(19) United States
(12) Patent Application Publication
(10) Pub. No.: US 2014/0026257 A1
(43) Pub. Date: Jan. 23, 2014

(54) Plants Having Enhanced Yield-Related Traits and Method for Making the Same

(71) Applicants: Yves Hatzfeld, Lille (FR); Christophe Reuzeau, La Chapelle Gonaguet (FR); Ana Isabel Sanz Molinero, Madrid (ES); Steven Vandenabeele, Oudenaarde (BE); Koen Bruynseels, Wichelen (BE); Valerie Frankard, Waterloo (BE)

(72) Inventors: Yves Hatzfeld, Lille (FR); Christophe Reuzeau, La Chapelle Gonaguet (FR); Ana Isabel Sanz Molinero, Madrid (ES); Steven Vandenabeele, Oudenaarde (BE); Koen Bruynseels, Wichelen (BE); Valerie Frankard, Waterloo (BE)

(73) Assignee: BASF PLANT SCIENCE COMPANY GmbH, LUDWIGSHAFEN (DE)

(21) Appl. No.: 13/818,858

(22) PCT Filed: Aug. 22, 2011
(86) PCT No.: PCT/IB11/53669

§ 371 Date: Feb. 25, 2013

Related U.S. Application Data
(60) Provisional application No. 61/376,304, filed on Aug. 24, 2010.
(60) Provisional application No. 61/378,965, filed on Sep. 1, 2010.
(60) Provisional application No. 61/406,212, filed on Oct. 25, 2010.

(51) Int. Cl. C12N 15/82

(52) U.S. Cl. CPC C12N 15/8261
USPC 800/290; 800/298; 435/320.1; 435/419; 800/320.2; 800/320.1; 800/320.3; 800/320; 536/23.6; 530/377

(57) ABSTRACT

The present invention relates generally to the field of molecular biology and concerns a method for enhancing various economically important yield-related traits in plants. More specifically, the present invention concerns a method for enhancing yield-related traits in plants by modulating expression in a plant of a nucleic acid encoding a WI12-like (WIL) polypeptide or a SAWADEE-like polypeptide or a POZ-like (Pox virus and Zn Finger) polypeptide. The present invention also concerns plants having modulated expression of a nucleic acid encoding a WIL polypeptide or a SAWADEE-like polypeptide or a POZ-like polypeptide, which have enhanced yield-related traits relative to control plants. The invention also provides hitherto unknown WIL-encoding nucleic acids, and constructs comprising the same, and hitherto unknown POZ-like encoding nucleic acids, and constructs comprising the same, useful in performing the methods of the invention.

[0001] The present invention relates generally to the field of molecular biology and concerns a method for enhancing yield-related traits in plants by modulating expression in a plant of a nucleic acid encoding a WI12-Like (WIL) polypeptide or a SAWADEE-like polypeptide or a POZ-like (Pox virus and Zn Finger) polypeptide. The present invention also concerns plants having modulated expression of a nucleic acid encoding a WIL polypeptide or a SAWADEE-like polypeptide or a POZ-like polypeptide, which plants have enhanced yield-related traits relative to corresponding wild type plants or other control plants. The invention also provides constructs useful in the methods of the invention.

[0002] The ever-increasing world population and the dwindling supply of arable land available for agriculture fuels research towards increasing the efficiency of agriculture. Conventional means for crop and horticultural improvements utilise selective breeding techniques to identify plants having desirable characteristics. However, such selective breeding techniques have several drawbacks, namely that these techniques are typically labour intensive and result in plants that often contain heterogeneous genetic components that may not always result in the desirable trait being passed on from parent plants. Advances in molecular biology have allowed mankind to modify the germplasm of animals and plants. Genetic engineering of plants entails the isolation and manipulation of genetic material (typically in the form of DNA or RNA) and the subsequent introduction of that genetic material into a plant. Such technology has the capacity to deliver crops or plants having various improved economic, agronomic or horticultural traits.

[0003] A trait of particular economic interest is increased yield. Yield is normally defined as the measurable produce of economic value from a crop. This may be defined in terms of quantity and/or quality. Yield is directly dependent on several factors, for example, the number and size of the organs, plant architecture (for example, the number of branches), seed production, leaf senescence and more. Root development, nutrient uptake, stress tolerance and early vigour may also be important factors in determining yield. Optimizing the abovementioned factors may therefore contribute to increasing crop yield.

[0004] Seed yield is a particularly important trait, since the seeds of many plants are important for human and animal nutrition. Crops such as corn, rice, wheat, canola and soybean account for over half the total human caloric intake, whether through direct consumption of the seeds themselves or through consumption of meat products raised on processed seeds. They are also a source of sugars, oils and many kinds of metabolites used in industrial processes. Seeds contain an embryo (the source of new shoots and roots) and an endosperm (the source of nutrients for embryo growth during germination and during early growth of seedlings). The development of a seed involves many genes, and requires the transfer of metabolites from the roots, leaves and stems into the growing seed. The endosperm, in particular, assimilates the metabolic precursors of carbohydrates, oils and proteins and synthesizes them into storage macromolecules to fill out the grain.

[0005] Another important trait for many crops is early vigour. Improving early vigour is an important objective of modern rice breeding programs in both temperate and tropical rice cultivars. Long roots are important for proper soil anchorage in water-seeded rice. Where rice is sown directly into flooded fields, and where plants must emerge rapidly through water, longer shoots are associated with vigour. Where drill-seeding is practiced, longer mesocotyls and coleoptiles are important for good seedling emergence. The ability to engineer early vigour into plants would be of great importance in agriculture. For example, poor early vigour has been a limitation to the introduction of maize (Zea mays L.) hybrids based on Corn Belt germplasm in the European Atlantic.

[0006] A further important trait is that of improved abiotic stress tolerance. Abiotic stress is a primary cause of crop loss worldwide, reducing average yields for most major crop plants by more than 50% (Wang et al., Planta 218, 1-14, 2003). Abiotic stresses may be caused by drought, salinity, extremes of temperature, chemical toxicity and oxidative stress. The ability to improve plant tolerance to abiotic stress would be of great economic advantage to farmers worldwide and would allow for the cultivation of crops during adverse conditions and in territories where cultivation of crops may not otherwise be possible.

[0007] Crop yield may therefore be increased by optimising one of the above-mentioned factors.

[0008] Depending on the end use, the modification of certain yield traits may be favoured over others. For example for applications such as forage or wood production, or bio-fuel resource, an increase in the vegetative parts of a plant may be desirable, and for applications such as flour, starch or oil production, an increase in seed parameters may be particularly desirable. Even amongst the seed parameters, some may be favoured over others, depending on the application. Various mechanisms may contribute to increasing seed yield, whether that is in the form of increased seed size or increased seed number.

[0009] It has now been found that various yield-related traits may be improved in plants by modulating expression in a plant of a nucleic acid encoding a WIL polypeptide or a SAWADEE-like polypeptide or a POZ-like (Pox virus and Zn Finger) polypeptide in a plant.

### BACKGROUND

[0010] WI12 like (WIL) polypeptides group proteins and polypeptides which show homology with WI12 as described in Yen et al. Plant Physiol. Vol. 127, 2001:517-528 as a wound responsive protein and WUN1 a known Solanum tuberosum wound-induced protein.

[0011] Homeobox genes encode a typical DNA-binding domain of ˜60 amino acids known as homeodomain (HD) that characterises a family of transcription factors. Mukherjee et al. (Mol. Biol. Evol. 26(12):2775-2794, 2009) have conducted a comprehensive classification of plant homeobox genes. One such class of homeobox genes was SAWADEE which are characterised by a homeodomain and a SAWADEE domain.

[0012] BTB family proteins contain a degenerate BTB (Broad complex/Tramtrack/Bric-a-brac) or POZ (Pox virus and Zinc finger) domain of approximately 120 amino acids long. The BTB/POZ domain is an evolutionarily conserved protein-protein interaction domain that is found at the N terminus of some C2H2-type zinc finger transcription factors and in some actin binding proteins having a kelch motif (Albagli et al., Cell Growth and Differentiation 6:1193-1198, 1995). This domain was further shown to mediate homo- or heteromeric dimerization (Bardwell and Treisman, Genes and Development 8:1664-1677, 1994) and shares a structural similarity to CUL1/2 interaction domains in the SKP1 and Elongin C adaptor proteins.

[0013] BTB-POZ domain proteins belong to multigene families with 3 members in S. pombe and about 80 members organized in 10 subfamilies in Arabidopsis (Gingerich et al., J Biol Chem. 280:18810-21, 2005). Subsequent yeast-2 hybrid and protein-protein interaction studies showed that CUL3 isoforms and BTB family members (but not all) can form E3 complexes. CUL-based multisubunit E3 complex was first discovered in C. elegans, S. pombe and humans. This complex includes CUL3, RBX1. In such a complex, BTB proteins might define a recognition motif for the assembly of substrate-specific RING/CUL3/BTB ubiquitin ligase complex. In both plants and yeast, CUL3 isoforms are important for embryo development, therefore, some BTB proteins might also play important role in embryo development. Furthermore, mutant analysis in plants showed that BTB proteins can be involved in a broad range of biological processes such as ethylene biosynthesis (ETO); disease resistance (NPR1), phototropism (NPH3), root phototropism (RPT2), hormone perception (ARIA) and responses (NPY1) and leaf morphology (BOP1).

### SUMMARY

[0014] Surprisingly, it has now been found that modulating expression of a nucleic acid encoding a WIL polypeptide or a SAWADEE-like polypeptide or a POZ-like polypeptide as defined herein gives plants having enhanced yield-related traits, in particular increased yield, more in particular increased seed yield, relative to control plants.

[0015] According one embodiment, there is provided a method for improving yield-related traits as provided herein in plants relative to control plants, comprising modulating expression in a plant of a nucleic acid encoding a WIL polypeptide or a SAWADEE-like polypeptide or a POZ-like polypeptide as defined herein.

[0016] The section captions and headings in this specification are for convenience and reference purpose only and should not affect in any way the meaning or interpretation of this specification.

### DEFINITIONS

[0017] The following definitions will be used throughout the present specification.

[0018] Polypeptide(s)/Protein(s)

[0019] The terms “polypeptide” and “protein” are used interchangeably herein and refer to amino acids in a polymeric form of any length, linked together by peptide bonds.

[0020] Polynucleotide(s)/Nucleic Acid(s)/Nucleic Acid Sequence(s)/Nucleotide Sequence(s)

[0021] The terms “polynucleotide(s)”, “nucleic acid sequence(s)”, “nucleotide sequence(s)”, “nucleic acid(s)”, “nucleic acid molecule” are used interchangeably herein and refer to nucleotides, either ribonucleotides or deoxyribonucleotides or a combination of both, in a polymeric unbranched form of any length.

[0022] Homologue(s)

[0023] “Homologues” of a protein encompass peptides, oligopeptides, polypeptides, proteins and enzymes having amino acid substitutions, deletions and/or insertions relative to the unmodified protein in question and having similar biological and functional activity as the unmodified protein from which they are derived.

[0024] A deletion refers to removal of one or more amino acids from a protein.

[0025] An insertion refers to one or more amino acid residues being introduced into a predetermined site in a protein. Insertions may comprise N-terminal and/or C-terminal fusions as well as intra-sequence insertions of single or multiple amino acids. Generally, insertions within the amino acid sequence will be smaller than N- or C-terminal fusions, of the order of about 1 to 10 residues. Examples of N- or C-terminal fusion proteins or peptides include the binding domain or activation domain of a transcriptional activator as used in the yeast two-hybrid system, phage coat proteins, (histidine)-6-tag, glutathione S-transferase-tag, protein A, maltose-binding protein, dihydrofolate reductase, Tag•100 epitope, c-myc epitope, FLAG®-epitope, lacZ, CMP (calmodulin-binding peptide), HA epitope, protein C epitope and VSV epitope.

[0026] A substitution refers to replacement of amino acids of the protein with other amino acids having similar properties (such as similar hydrophobicity, hydrophilicity, antigenicity, propensity to form or break α-helical structures or β-sheet structures). Amino acid substitutions are typically of single residues, but may be clustered depending upon functional constraints placed upon the polypeptide and may range from 1 to 10 amino acids; insertions will usually be of the order of about 1 to 10 amino acid residues. The amino acid substitutions are preferably conservative amino acid substitutions. Conservative substitution tables are well known in the art (see for example Creighton (1984) Proteins. W.H. Freeman and Company (Eds) and Table 1 below).

TABLE 1
Examples of
conserved amino acid substitutions

| | Conservative |
|---|---|
| Residue | Substitutions |
| Ala | Ser |
| Arg | Lys |
| Asn | Gln; His |
| Asp | Glu |
| Gln | Asn |
| Cys | Ser |
| Glu | Asp |
| Gly | Pro |
| His | Asn; Gln |
| Ile | Leu, Val |
| Leu | Ile; Val |
| Lys | Arg; Gln |
| Met | Leu; Ile |
| Phe | Met; Leu; Tyr |
| Ser | Thr; Gly |
| Thr | Ser; Val |
| Trp | Tyr |
| Tyr | Trp; Phe |
| Val | Ile; Leu |

[0027] Amino acid substitutions, deletions and/or insertions may readily be made using peptide synthetic techniques well known in the art, such as solid phase peptide synthesis and the like, or by recombinant DNA manipulation. Methods for the manipulation of DNA sequences to produce substitution, insertion or deletion variants of a protein are well known in the art. For example, techniques for making substitution mutations at predetermined sites in DNA are well known to those skilled in the art and include M13 mutagenesis, T7-Gen in vitro mutagenesis (USB, Cleveland, Ohio), QuickChange Site Directed mutagenesis (Stratagene, San Diego, Calif.), PCR-mediated site-directed mutagenesis or other site-directed mutagenesis protocols.

[0028] Derivatives

[0029] “Derivatives” include peptides, oligopeptides, polypeptides which may, compared to the amino acid sequence of the naturally-occurring form of the protein, such as the protein of interest, comprise substitutions of amino acids with non-naturally occurring amino acid residues, or additions of non-naturally occurring amino acid residues. “Derivatives” of a protein also encompass peptides, oligopeptides, polypeptides which comprise naturally occurring altered (glycosylated, acylated, prenylated, phosphorylated, myristoylated, sulphated, etc.) or non-naturally altered amino acid residues compared to the amino acid sequence of a naturally-occurring form of the polypeptide. A derivative may also comprise one or more non-amino acid substituents or additions compared to the amino acid sequence from which it is derived, for example a reporter molecule or other ligand, covalently or non-covalently bound to the amino acid sequence, such as a reporter molecule which is bound to facilitate its detection, and non-naturally occurring amino acid residues relative to the amino acid sequence of a naturally-occurring protein. Furthermore, “derivatives” also include fusions of the naturally-occurring form of the protein with tagging peptides such as FLAG, HIS6 or thioredoxin (for a review of tagging peptides, see Terpe, Appl. Microbiol. Biotechnol. 60, 523-533, 2003).

[0030] Orthologue(s)/Paralogue(s)

[0031] Orthologues and paralogues encompass evolutionary concepts used to describe the ancestral relationships of genes. Paralogues are genes within the same species that have originated through duplication of an ancestral gene; orthologues are genes from different organisms that have originated through speciation, and are also derived from a common ancestral gene.

[0032] Domain, Motif/Consensus Sequence/Signature

[0033] The term “domain” refers to a set of amino acids conserved at specific positions along an alignment of sequences of evolutionarily related proteins. While amino acids at other positions can vary between homologues, amino acids that are highly conserved at specific positions indicate amino acids that are likely essential in the structure, stability or function of a protein. Identified by their high degree of conservation in aligned sequences of a family of protein homologues, they can be used as identifiers to determine if any polypeptide in question belongs to a previously identified polypeptide family.

[0034] The term “motif” or “consensus sequence” or “signature” refers to a short conserved region in the sequence of evolutionarily related proteins. Motifs are frequently highly conserved parts of domains, but may also include only part of the domain, or be located outside of conserved domain (if all of the amino acids of the motif fall outside of a defined domain).

[0035] Specialist databases exist for the identification of domains, for example, SMART (Schultz et al. (1998) Proc. Natl. Acad. Sci. USA 95, 5857-5864; Letunic et al. (2002) Nucleic Acids Res 30, 242-244), InterPro (Mulder et al., (2003) Nucl. Acids. Res. 31, 315-318), Prosite (Bucher and Bairoch (1994), A generalized profile syntax for biomolecular sequences motifs and its function in automatic sequence interpretation. (In) ISMB-94; Proceedings 2nd International Conference on Intelligent Systems for Molecular Biology. Altman R., Brutlag D., Karp P., Lathrop R., Searls D., Eds., pp 53-61, AAAI Press, Menlo Park; Hulo et al., Nucl. Acids. Res. 32:D134-D137, (2004)), or Pfam (Bateman et al., Nucleic Acids Research 30(1): 276-280 (2002)). A set of tools for in silico analysis of protein sequences is available on the ExPASy proteomics server (Swiss Institute of Bioinformatics (Gasteiger et al., ExPASy: the proteomics server for in-depth protein knowledge and analysis, Nucleic Acids Res. 31:3784-3788 (2003)). Domains or motifs may also be identified using routine techniques, such as by sequence alignment.

[0036] Methods for the alignment of sequences for comparison are well known in the art, such methods include GAP, BESTFIT, BLAST, FASTA and TFASTA. GAP uses the algorithm of Needleman and Wunsch ((1970) J Mol Biol 48: 443-453) to find the global (i.e. spanning the complete sequences) alignment of two sequences that maximizes the number of matches and minimizes the number of gaps. The BLAST algorithm (Altschul et al. (1990) J Mol Biol 215: 403-10) calculates percent sequence identity and performs a statistical analysis of the similarity between the two sequences. The software for performing BLAST analysis is publicly available through the National Centre for Biotechnology Information (NCBI). Homologues may readily be identified using, for example, the ClustalW multiple sequence alignment algorithm (version 1.83), with the default pairwise alignment parameters, and a scoring method in percentage. Global percentages of similarity and identity may also be determined using one of the methods available in the MatGAT software package (Campanella et al., BMC Bioinformatics. 2003 Jul. 10; 4:29. MatGAT: an application that generates similarity/identity matrices using protein or DNA sequences.). Minor manual editing may be performed to optimise alignment between conserved motifs, as would be apparent to a person skilled in the art. Furthermore, instead of using full-length sequences for the identification of homologues, specific domains may also be used. The sequence identity values may be determined over the entire nucleic acid or amino acid sequence or over selected domains or conserved motif(s), using the programs mentioned above using the default parameters. For local alignments, the Smith-Waterman algorithm is particularly useful (Smith T F, Waterman M S (1981) J. Mol. Biol 147(1); 195-7).

[0037] Reciprocal BLAST

[0038] Typically, this involves a first BLAST involving BLASTing a query sequence (for example using any of the sequences listed in the Tables of the Examples section) against any sequence database, such as the publicly available NCBI database. BLASTN or TBLASTX (using standard default values) are generally used when starting from a nucleotide sequence, and BLASTP or TBLASTN (using standard default values) when starting from a protein sequence. The BLAST results may optionally be filtered. The full-length sequences of either the filtered results or non-filtered results are then BLASTed back (second BLAST) against sequences from the organism from which the query sequence is derived. The results of the first and second BLASTs are then compared. A paralogue is identified if a high-ranking hit from the first blast is from the same species as from which the query sequence is derived, a BLAST back then ideally results in the query sequence amongst the highest hits; an orthologue is identified if a high-ranking hit in the first BLAST is not from the same species as from which the query sequence is derived, and preferably results upon BLAST back in the query sequence being among the highest hits.

[0039] High-ranking hits are those having a low E-value. The lower the E-value, the more significant the score (or in other words the lower the chance that the hit was found by chance). Computation of the E-value is well known in the art. In addition to E-values, comparisons are also scored by percentage identity. Percentage identity refers to the number of identical nucleotides (or amino acids) between the two compared nucleic acid (or polypeptide) sequences over a particular length. In the case of large families, ClustalW may be used, followed by a neighbour joining tree, to help visualize clustering of related genes and to identify orthologues and paralogues.

[0040] Hybridisation

[0041] The term “hybridisation” as defined herein is a process wherein substantially homologous complementary nucleotide sequences anneal to each other. The hybridisation process can occur entirely in solution, i.e. both complementary nucleic acids are in solution. The hybridisation process can also occur with one of the complementary nucleic acids immobilised to a matrix such as magnetic beads, Sepharose beads or any other resin. The hybridisation process can furthermore occur with one of the complementary nucleic acids immobilised to a solid support such as a nitro-cellulose or nylon membrane or immobilised by e.g. photolithography to, for example, a siliceous glass support (the latter known as nucleic acid arrays or microarrays or as nucleic acid chips). In order to allow hybridisation to occur, the nucleic acid molecules are generally thermally or chemically denatured to melt a double strand into two single strands and/or to remove hairpins or other secondary structures from single stranded nucleic acids.

[0042] The term “stringency” refers to the conditions under which a hybridisation takes place. The stringency of hybridisation is influenced by conditions such as temperature, salt concentration, ionic strength and hybridisation buffer composition. Generally, low stringency conditions are selected to be about 30° C. lower than the thermal melting point (Tm) for the specific sequence at a defined ionic strength and pH. Medium stringency conditions are when the temperature is 20° C. below Tm, and high stringency conditions are when the temperature is 10° C. below Tm. High stringency hybridisation conditions are typically used for isolating hybridising sequences that have high sequence similarity to the target nucleic acid sequence. However, nucleic acids may deviate in sequence and still encode a substantially identical polypeptide, due to the degeneracy of the genetic code. Therefore medium stringency hybridisation conditions may sometimes be needed to identify such nucleic acid molecules.

[0043] The Tm is the temperature under defined ionic strength and pH, at which 50% of the target sequence hybridises to a perfectly matched probe. The Tm is dependent upon the solution conditions and the base composition and length of the probe. For example, longer sequences hybridise specifically at higher temperatures. The maximum rate of hybridisation is obtained from about 16° C. up to 32° C. below Tm. The presence of monovalent cations in the hybridisation solution reduce the electrostatic repulsion between the two nucleic acid strands thereby promoting hybrid formation; this effect is visible for sodium concentrations of up to 0.4M (for higher concentrations, this effect may be ignored). Formamide reduces the melting temperature of DNA-DNA and DNA-RNA duplexes with 0.6 to 0.7° C. for each percent formamide, and addition of 50% formamide allows hybridisation to be performed at 30 to 45° C., though the rate of hybridisation will be lowered. Base pair mismatches reduce the hybridisation rate and the thermal stability of the duplexes. On average and for large probes, the Tm decreases about 1° C. per % base mismatch. The Tm may be calculated using the following equations, depending on the types of hybrids:

1) DNA-DNA hybrids (Meinkoth and Wahl, Anal. Biochem., 138: 267-284, 1984):

Tm=81.5° C.+16.6×log 10[Na+]a+0.41×% [G/Cb]−500×[Lc]−1−0.61×% formamide

2) DNA-RNA or RNA-RNA hybrids:

Tm=79.8° C.+18.5(log 10[Na+]a)+0.58(% G/Cb)+11.8(% G/Cb)2−820/Lc

3) oligo-DNA or oligo-RNAd hybrids:

For <20 nucleotides: Tm=2(In)

For 20-35 nucleotides: Tm=22+1.46(In)

a or for other monovalent cation, but only accurate in the 0.01-0.4 M range.
b only accurate for % GC in the 30% to 75% range.
c L=length of duplex in base pairs.
d oligo, oligonucleotide; In, =effective length of primer=2×(no. of G/C)+(no. of NT).

[0044] Non-specific binding may be controlled using any one of a number of known techniques such as, for example, blocking the membrane with protein containing solutions, additions of heterologous RNA, DNA, and SDS to the hybridisation buffer, and treatment with Rnase. For non-homologous probes, a series of hybridizations may be performed by varying one of (i) progressively lowering the annealing temperature (for example from 68° C. to 42° C.) or (ii) progressively lowering the formamide concentration (for example from 50% to 0%). The skilled artisan is aware of various parameters which may be altered during hybridisation and which will either maintain or change the stringency conditions.

[0045] Besides the hybridisation conditions, specificity of hybridisation typically also depends on the function of post-hybridisation washes. To remove background resulting from non-specific hybridisation, samples are washed with dilute salt solutions. Critical factors of such washes include the ionic strength and temperature of the final wash solution: the lower the salt concentration and the higher the wash temperature, the higher the stringency of the wash. Wash conditions are typically performed at or below hybridisation stringency. A positive hybridisation gives a signal that is at least twice of that of the background. Generally, suitable stringent conditions for nucleic acid hybridisation assays or gene amplification detection procedures are as set forth above. More or less stringent conditions may also be selected. The skilled artisan is aware of various parameters which may be altered during washing and which will either maintain or change the stringency conditions.

[0046] For example, typical high stringency hybridisation conditions for DNA hybrids longer than 50 nucleotides encompass hybridisation at 65° C. in 1×SSC or at 42° C. in 1×SSC and 50% formamide, followed by washing at 65° C. in 0.3×SSC. Examples of medium stringency hybridisation conditions for DNA hybrids longer than 50 nucleotides encompass hybridisation at 50° C. in 4×SSC or at 40° C. in 6×SSC and 50% formamide, followed by washing at 50° C. in 2×SSC. The length of the hybrid is the anticipated length for the hybridising nucleic acid. When nucleic acids of known sequence are hybridised, the hybrid length may be determined by aligning the sequences and identifying the conserved regions described herein. 1×SSC is 0.15M NaCI and 15 mM sodium citrate; the hybridisation solution and wash solutions may additionally include 5×Denhardt's reagent, 0.5-1.0% SDS, 100 μg/ml denatured, fragmented salmon sperm DNA, 0.5% sodium pyrophosphate.

[0047] For the purposes of defining the level of stringency, reference can be made to Sambrook et al. (2001) Molecular Cloning: a laboratory manual, 3rd Edition, Cold Spring Harbor Laboratory Press, CSH, New York or to Current Protocols in Molecular Biology, John Wiley & Sons, N.Y. (1989 and yearly updates).

[0048] Splice Variant

[0049] The term “splice variant” as used herein encompasses variants of a nucleic acid sequence in which selected introns and/or exons have been excised, replaced, displaced or added, or in which introns have been shortened or lengthened. Such variants will be ones in which the biological activity of the protein is substantially retained; this may be achieved by selectively retaining functional segments of the protein. Such splice variants may be found in nature or may be manmade. Methods for predicting and isolating such splice variants are well known in the art (see for example Foissac and Schiex (2005) BMC Bioinformatics 6: 25).

[0050] Allelic Variant

[0051] Alleles or allelic variants are alternative forms of a given gene, located at the same chromosomal position. Allelic variants encompass Single Nucleotide Polymorphisms (SNPs), as well as Small Insertion/Deletion Polymorphisms (INDELs). The size of INDELs is usually less than 100 bp. SNPs and INDELs form the largest set of sequence variants in naturally occurring polymorphic strains of most organisms.

[0052] Endogenous Gene

[0053] Reference herein to an “endogenous” gene not only refers to the gene in question as found in a plant in its natural form (i.e., without there being any human intervention), but also refers to that same gene (or a substantially homologous nucleic acid/gene) in an isolated form subsequently (re)introduced into a plant (a transgene). For example, a transgenic plant containing such a transgene may encounter a substantial reduction of the transgene expression and/or substantial reduction of expression of the endogenous gene. The isolated gene may be isolated from an organism or may be manmade, for example by chemical synthesis.

[0054] Gene Shuffling/Directed Evolution

[0055] Gene shuffling or directed evolution consists of iterations of DNA shuffling followed by appropriate screening and/or selection to generate variants of nucleic acids or portions thereof encoding proteins having a modified biological activity (Castle et al., (2004) Science 304(5674): 1151-4; U.S. Pat. Nos. 5,811,238 and 6,395,547).

[0056] Construct

[0057] Additional regulatory elements may include transcriptional as well as translational enhancers. Those skilled in the art will be aware of terminator and enhancer sequences that may be suitable for use in performing the invention. An intron sequence may also be added to the 5′ untranslated region (UTR) or in the coding sequence to increase the amount of the mature message that accumulates in the cytosol, as described in the definitions section. Other control sequences (besides promoter, enhancer, silencer, intron sequences, 3′UTR and/or 5′UTR regions) may be protein and/or RNA stabilizing elements. Such sequences would be known or may readily be obtained by a person skilled in the art.

[0058] The genetic constructs of the invention may further include an origin of replication sequence that is required for maintenance and/or replication in a specific cell type. One example is when a genetic construct is required to be maintained in a bacterial cell as an episomal genetic element (e.g. plasmid or cosmid molecule). Preferred origins of replication include, but are not limited to, the f1-ori and colE1.

[0059] For the detection of the successful transfer of the nucleic acid sequences as used in the methods of the invention and/or selection of transgenic plants comprising these nucleic acids, it is advantageous to use marker genes (or reporter genes). Therefore, the genetic construct may optionally comprise a selectable marker gene. Selectable markers are described in more detail in the “definitions” section herein. The marker genes may be removed or excised from the transgenic cell once they are no longer needed. Techniques for marker removal are known in the art, useful techniques are described above in the definitions section.

[0060] Regulatory Element/Control Sequence/Promoter

[0061] The terms “regulatory element”, “control sequence” and “promoter” are all used interchangeably herein and are to be taken in a broad context to refer to regulatory nucleic acid sequences capable of effecting expression of the sequences to which they are ligated. The term “promoter” typically refers to a nucleic acid control sequence located upstream from the transcriptional start of a gene and which is involved in recognising and binding of RNA polymerase and other proteins, thereby directing transcription of an operably linked nucleic acid. Encompassed by the aforementioned terms are transcriptional regulatory sequences derived from a classical eukaryotic genomic gene (including the TATA box which is required for accurate transcription initiation, with or without a CCAAT box sequence) and additional regulatory elements (i.e. upstream activating sequences, enhancers and silencers) which alter gene expression in response to developmental and/or external stimuli, or in a tissue-specific manner. Also included within the term is a transcriptional regulatory sequence of a classical prokaryotic gene, in which case it may include a −35 box sequence and/or −10 box transcriptional regulatory sequences. The term “regulatory element” also encompasses a synthetic fusion molecule or derivative that confers, activates or enhances expression of a nucleic acid molecule in a cell, tissue or organ.

[0062] A “plant promoter” comprises regulatory elements, which mediate the expression of a coding sequence segment in plant cells. Accordingly, a plant promoter need not be of plant origin, but may originate from viruses or micro-organisms, for example from viruses which attack plant cells. The “plant promoter” can also originate from a plant cell, e.g. from the plant which is transformed with the nucleic acid sequence to be expressed in the inventive process and described herein. This also applies to other “plant” regulatory signals, such as “plant” terminators. The promoters upstream of the nucleotide sequences useful in the methods of the present invention can be modified by one or more nucleotide substitution(s), insertion(s) and/or deletion(s) without interfering with the functionality or activity of either the promoters, the open reading frame (ORF) or the 3′-regulatory region such as terminators or other 3′ regulatory regions which are located away from the ORF. It is furthermore possible that the activity of the promoters is increased by modification of their sequence, or that they are replaced completely by more active promoters, even promoters from heterologous organisms. For expression in plants, the nucleic acid molecule must, as described above, be linked operably to or comprise a suitable promoter which expresses the gene at the right point in time and with the required spatial expression pattern.

[0063] For the identification of functionally equivalent promoters, the promoter strength and/or expression pattern of a candidate promoter may be analysed for example by operably linking the promoter to a reporter gene and assaying the expression level and pattern of the reporter gene in various tissues of the plant. Suitable well-known reporter genes include for example beta-glucuronidase or beta-galactosidase. The promoter activity is assayed by measuring the enzymatic activity of the beta-glucuronidase or beta-galactosidase. The promoter strength and/or expression pattern may then be compared to that of a reference promoter (such as the one used in the methods of the present invention). Alternatively, promoter strength may be assayed by quantifying mRNA levels or by comparing mRNA levels of the nucleic acid used in the methods of the present invention, with mRNA levels of housekeeping genes such as 18S rRNA, using methods known in the art, such as Northern blotting with densitometric analysis of autoradiograms, quantitative real-time PCR or RT-PCR (Heid et al., 1996 Genome Methods 6: 986-994). Generally by “weak promoter” is intended a promoter that drives expression of a coding sequence at a low level. By “low level” is intended at levels of about 1/10,000 transcripts to about 1/100,000 transcripts, to about 1/500,0000 transcripts per cell. Conversely, a “strong promoter” drives expression of a coding sequence at high level, or at about 1/10 transcripts to about 1/100 transcripts to about 1/1000 transcripts per cell. Generally, by “medium strength promoter” is intended a promoter that drives expression of a coding sequence at a lower level than a strong promoter, in particular at a level that is in all instances below that obtained when under the control of a 35S CaMV promoter.

[0064] Operably Linked

[0065] The term “operably linked” as used herein refers to a functional linkage between the promoter sequence and the gene of interest, such that the promoter sequence is able to initiate transcription of the gene of interest.

[0066] Constitutive Promoter

[0067] A “constitutive promoter” refers to a promoter that is transcriptionally active during most, but not necessarily all, phases of growth and development and under most environmental conditions, in at least one cell, tissue or organ. Table 2a below gives examples of constitutive promoters.

TABLE 2a
Examples of constitutive promoters

| Gene Source | Reference |
|---|---|
| Actin | McElroy et al, Plant Cell, 2: 163-171, 1990 |
| HMGP | WO 2004/070039 |
| CAMV 35S | Odell et al, Nature, 313: 810-812, 1985 |
| CaMV 19S | Nilsson et al., Physiol. Plant. 100: 456-462, 1997 |
| GOS2 | de Pater et al, Plant J Nov.; |
| | 2(6): 837-44, 1992, WO 2004/065596 |
| Ubiquitin | Christensen et al, Plant Mol. Biol. 18: 675-689, 1992 |
| Rice cyclophilin | Buchholz et al, Plant Mol Biol. 25(5): 837-43, 1994 |
| Maize H3 histone | Lepetit et al, Mol. Gen. Genet. 231: 276-285, 1992 |
| Alfalfa H3 histone | Wu et al. Plant Mol. Biol. 11: 641-649, 1988 |
| Actin 2 | An et al, Plant J. 10(1); 107-121, 1996 |
| 34S FMV | Sanger et al., Plant. Mol. Biol., 14, 1990: 433-443 |
| Rubisco small subunit | U.S. Pat. No. 4,962,028 |
| OCS | Leisner (1988) Proc Natl Acad Sci USA 85(5): 2553 |
| SAD1 | Jain et al., Crop Science, 39 (6), 1999: 1696 |
| SAD2 | Jain et al., Crop Science, 39 (6), 1999: 1696 |
| nos | Shaw et al. (1984) Nucleic Acids |
| | Res. 12(20): 7831-7846 |
| V-ATPase | WO 01/14572 |
| Super promoter | WO 95/14098 |
| G-box proteins | WO 94/12015 |

[0068] Ubiquitous Promoter

[0069] A ubiquitous promoter is active in substantially all tissues or cells of an organism.

[0070] Developmentally-Regulated Promoter

[0071] A developmentally-regulated promoter is active during certain developmental stages or in parts of the plant that undergo developmental changes.

[0072] Inducible Promoter

[0073] An inducible promoter has induced or increased transcription initiation in response to a chemical (for a review see Gatz 1997, Annu. Rev. Plant Physiol. Plant Mol. Biol., 48:89-108), environmental or physical stimulus, or may be “stress-inducible”, i.e. activated when a plant is exposed to various stress conditions, or a “pathogen-inducible” i.e. activated when a plant is exposed to exposure to various pathogens.

[0074] Organ-Specific/Tissue-Specific Promoter

[0075] An organ-specific or tissue-specific promoter is one that is capable of preferentially initiating transcription in certain organs or tissues, such as the leaves, roots, seed tissue etc. For example, a “root-specific promoter” is a promoter that is transcriptionally active predominantly in plant roots, substantially to the exclusion of any other parts of a plant, whilst still allowing for any leaky expression in these other plant parts. Promoters able to initiate transcription in certain cells only are referred to herein as “cell-specific”.

[0076] Examples of root-specific promoters are listed in Table 2b below:

TABLE 2b
Examples of root-specific promoters

| Gene Source | Reference |
|---|---|
| RCc3 | Plant Mol Biol. 1995 Jan.; 27(2): 237-48 |
| Arabidopsis PHT1 | Koyama et al. J Biosci Bioeng. 2005 Jan.; |
| | 99(1): 38-42.; Mudge et al. (2002, Plant |
| | J. 31: 341) |
| Medicago phosphate | Xiao et al., 2006, Plant Biol (Stuttg). 2006 |
| transporter | Jul.; 8(4): 439-49 |
| Arabidopsis Pyk10 | Nitz et al. (2001) Plant Sci 161(2): |
| | 337-346 |
| root-expressible genes | Tingey et al., EMBO J. 6 :1, 1987. |
| tobacco auxin-inducible gene | Van der Zaal et al., Plant Mol. Biol. |
| | 16, 983, 1991. |
| β-tubulin | Oppenheimer, et al., Gene 63: 87, 1988. |
| tobacco root-specific genes | Conkling, et al., Plant Physiol. 93: |
| | 1203, 1990. |
| B. napus G1-3b gene | U.S. Pat. No. 5, 401, 836 |
| SbPRP1 | Suzuki et al., Plant Mol. Biol. 21: |
| | 109-119, 1993. |
| LRX1 | Baumberger et al. 2001, Genes & Dev. |
| | 15: 1128 |
| BTG-26 Brassica napus | US 20050044585 |
| LeAMT1 (tomato) | Lauter et al. (1996, PNAS 3 :8139) |
| The LeNRT1-1 (tomato) | Lauter et al. (1996, PNAS 3 :8139) |
| class I patatin gene (potato) | Liu et al., Plant Mol. Biol. 17(6): |
| | 1139-1154 |
| KDC1 (Daucus carota) | Downey et al. (2000, J. Biol. |
| | Chem. 275 :39420) |
| TobRB7 gene | W Song (1997) PhD Thesis, North |
| | Carolina State University, |
| | Raleigh, NC USA |
| OsRAB5a (rice) | Wang et al. 2002, Plant Sci. 163 :273 |
| ALF5 (Arabidopsis) | Diener et al. (2001, Plant Cell 13 :1625) |
| NRT2; 1Np (N. plumbaginifolia) | Quesada et al. (1997, Plant Mol. |
| | Biol. 34 :265) |

[0077] A seed-specific promoter is transcriptionally active predominantly in seed tissue, but not necessarily exclusively in seed tissue (in cases of leaky expression). The seed-specific promoter may be active during seed development and/or during germination. The seed specific promoter may be endosperm/aleurone/embryo specific. Examples of seed-specific promoters (endosperm/aleurone/embryo specific) are shown in Table 2c to Table 2f below. Further examples of seed-specific promoters are given in Qing Qu and Takaiwa (Plant Biotechnol. J. 2, 113-125, 2004), which disclosure is incorporated by reference herein as if fully set forth.

TABLE 2c
Examples of seed-specific promoters

| Gene source | Reference |
|---|---|
| seed-specific genes | Simon et al., Plant Mol. Biol. 5: 191, 1985; |
| | Scofield et al., J. Biol. Chem. 262: 12202, |
| | 1987.;Baszczynski et al., Plant Mol. |
| | Biol. 14: 633, 1990. |
| Brazil Nut albumin | Pearson et al., Plant Mol. Biol. 18: 235-245, |
| | 1992. |
| legumin | Ellis et al., Plant Mol. Biol. 10: 203-214, 1988. |
| glutelin (rice) | Takaiwa et al., Mol. Gen. Genet. 208: |
| | 15-22, 1986; Takaiwa et al., FEBS |
| | Letts. 221: 43-47, 1987. |
| zein | Matzke et al Plant Mol Biol, 14(3): |
| | 323-32 1990 |
| napA | Stalberg et al, Planta 199: 515-519, 1996. |
| wheat LMW and HMW | Mol Gen Genet 216: 81-90, 1989; NAR 17: |
| glutenin-1 | 461-2, 1989 |
| wheat SPA | Albani et al, Plant Cell, 9: 171-184, 1997 |
| wheat α, β, γ-gliadins | EMBO J. 3: 1409-15, 1984 |
| barley Itr1 promoter | Diaz et al. (1995) Mol Gen Genet 248(5): |
| | 592-8 |
| barley B1, C, D, hordein | Theor Appl Gen 98: 1253-62, 1999; |
| | Plant J 4: 343-55, 1993; Mol Gen Genet 250: |
| | 750-60, 1996 |
| barley DOF | Mena et al, The Plant Journal, 116(1): |
| | 53-62, 1998 |
| blz2 | EP99106056.7 |
| synthetic promoter | Vicente-Carbajosa et al., Plant J. 13: |
| | 629-640, 1998. |
| rice prolamin NRP33 | Wu et al, Plant Cell Physiology 39(8) |
| | 885-889, 1998 |
| rice a-globulin Glb-1 | Wu et al, Plant Cell Physiology 39(8) |
| | 885-889, 1998 |
| rice OSH1 | Sato et al, Proc. Natl. Acad. Sci. USA, 93: |
| | 8117-8122, 1996 |
| rice α-globulin REB/OHP-1 | Nakase et al. Plant Mol. Biol. 33: |
| | 513-522, 1997 |
| rice ADP-glucose pyrophos- | Trans Res 6: 157-68, 1997 |
| phorylase | |
| maize ESR gene family | Plant J 12: 235-46, 1997 |
| sorghum α-kafirin | DeRose et al., Plant Mol. Biol 32: |
| | 1029-35, 1996 |
| KNOX | Postma-Haarsma et al, Plant Mol. Biol. 39: |
| | 257-71, 1999 |
| rice oleosin | Wu et al, J. Biochem. 123: 386, 1998 |
| sunflower oleosin | Cummins et al., Plant Mol. Biol. 19: |
| | 873-876, 1992 |
| PRO0117, putativerice 40S | WO 2004/070039 |
| ribosomal protein | |
| PRO0136, rice alanine | unpublished |
| aminotransferase | |
| PRO0147, trypsin inhibitor | unpublished |
| ITR1 (barley) | |
| PRO0151, rice WSI18 | WO 2004/070039 |
| PRO0175, rice RAB21 | WO 2004/070039 |
| PRO005 | WO 2004/070039 |
| PRO0095 | WO 2004/070039 |
| α-amylase (Amy32b) | Lanahan et al, Plant Cell 4: 203-211, |
| | 1992; Skriver et al, Proc Natl Acad Sci |
| | USA 88: 7266-7270, 1991 |
| cathepsin β-like gene | Cejudo et al, Plant Mol Biol 20: 849-856, 1992 |
| Barley Ltp2 | Kalla et al., Plant J. 6: 849-60, 1994 |
| Chi26 | Leah et al., Plant J. 4: 579-89, 1994 |
| Maize B-Peru | Selinger et al., Genetics 149; 1125-38,1998 |

TABLE 2d
examples of endosperm-specific promoters

| Gene source | Reference |
|---|---|
| glutelin (rice) | Takaiwa et al. (1986) Mol Gen Genet 208: 15-22; |
| | Takaiwa et al. (1987) FEBS Letts. 221: 43-47 |
| zein | Matzke et al., (1990) Plant Mol Biol 14(3): 323-32 |
| wheat LMW and HMW glutenin-1 | Colot et al. (1989) Mol Gen Genet 216: 81-90, |
| | Anderson et al. (1989) NAR 17: 461-2 |
| wheat SPA | Albani et al. (1997) Plant Cell 9: 171-184 |
| wheat gliadins | Rafalski et al. (1984) EMBO 3: 1409-15 |
| barley Itr1 promoter | Diaz et al. (1995) Mol Gen Genet 248(5): 592-8 |
| barley B1, C, D, hordein | Cho et al. (1999) Theor Appl Genet 98: 1253-62; |
| | Muller et al. (1993) Plant J 4: 343-55; |
| | Sorenson et al. (1996) Mol Gen Genet 250: 750-60 |
| barley DOF | Mena et al, (1998) Plant J 116(1): 53-62 |
| blz2 | Onate et al. (1999) J Biol Chem 274(14): 9175-82 |
| synthetic promoter | Vicente-Carbajosa et al. (1998) Plant J 13: 629-640 |
| rice prolamin NRP33 | Wu et al, (1998) Plant Cell Physiol 39(8) 885-889 |
| rice globulin Glb-1 | Wu et al. (1998) Plant Cell Physiol 39(8) 885-889 |
| rice globulin REB/OHP-1 | Nakase et al. (1997) Plant Molec Biol 33: 513-522 |
| rice ADP-glucose pyrophosphorylase | Russell et al. (1997) Trans Res 6: 157-68 |
| maize ESR gene family | Opsahl-Ferstad et al. (1997) Plant J 12: 235-46 |
| sorghum kafirin | DeRose et al. (1996) Plant Mol Biol 32: 1029-35 |

TABLE 2e
Examples of embryo specific promoters:

| Gene source | Reference |
|---|---|
| rice OSH1 | Sato et al, Proc. Natl. Acad. Sci. USA, 93: 8117-8122, 1996 |
| KNOX | Postma-Haarsma et al, Plant Mol. Biol. 39: 257-71, 1999 |
| PRO0151 | WO 2004/070039 |
| PRO0175 | WO 2004/070039 |
| PRO005 | WO 2004/070039 |
| PRO0095 | WO 2004/070039 |

TABLE 2f
Examples of aleurone-specific promoters:

| Gene source | Reference |
|---|---|
| α-amylase (Amy32b) | Lanahan et al, Plant Cell 4: 203-211, 1992; |
| | Skriver et al, Proc Natl Acad Sci USA |
| | 88: 7266-7270, 1991 |
| cathepsin β-like gene | Cejudo et al, Plant Mol Biol 20: 849-856, 1992 |
| Barley Ltp2 | Kalla et al., Plant J. 6: 849-60, 1994 |
| Chi26 | Leah et al., Plant J. 4: 579-89, 1994 |
| Maize B-Peru | Selinger et al., Genetics 149; 1125-38,1998 |

[0078] A green tissue-specific promoter as defined herein is a promoter that is transcriptionally active predominantly in green tissue, substantially to the exclusion of any other parts of a plant, whilst still allowing for any leaky expression in these other plant parts.

[0079] Examples of green tissue-specific promoters which may be used to perform the methods of the invention are shown in Table 2g below.

TABLE 2g
Examples of green tissue-specific promoters

| Gene | Expression | Reference |
|---|---|---|
| Maize Orthophosphate | Leaf specific | Fukavama et al., Plant |
| dikinase | | Physiol. 2001 Nov.; |
| | | 127(3): 1136-46 |
| Maize Phosphoenolpyruvate | Leaf specific | Kausch et al., Plant Mol Biol. |
| carboxylase | | 2001 Jan.; 45(1): 1-15 |
| Rice Phosphoenolpyruvate | Leaf specific | Lin et al., 2004 DNA Seq. |
| carboxylase | | 2004 Aug.; 15(4): |
| | | 269-76 |
| Rice small subunit | Leaf specific | Nomura et al., Plant Mol |
| Rubisco | | Biol. 2000 Sep.; 44(1): |
| | | 99-106 |
| rice beta expansin EXBP9 | Shoot specific | WO 2004/070039 |
| Pigeonpea small subunit | Leaf specific | Panguluri et al., Indian J Exp |
| Rubisco | | Biol. 2005 Apr.; 43(4): 369-72 |
| Pea RBCS3A | Leaf specific | |

[0080] Another example of a tissue-specific promoter is a meristem-specific promoter, which is transcriptionally active predominantly in meristematic tissue, substantially to the exclusion of any other parts of a plant, whilst still allowing for any leaky expression in these other plant parts. Examples of green meristem-specific promoters which may be used to perform the methods of the invention are shown in Table 2h below.

TABLE 2h
Examples of meristem-specific promoters

| Gene source | Expression pattern | Reference |
|---|---|---|
| rice OSH1 | Shoot apical meristem, | Sato et al. (1996) Proc. |
| | from embryo globular | Natl. Acad.Sci. USA, |
| | stage to seedling stage | 93: 8117-8122 |
| Rice metallothionein | Meristem specific | BAD87835.1 |
| WAK1 & WAK 2 | Shoot and root apical | Wagner & Kohorn |
| | meristems, and in | (2001) Plant Cell 13(2): |
| | expanding leaves and | 303-318 |
| | sepals | |

[0081] Terminator

[0082] The term “terminator” encompasses a control sequence which is a DNA sequence at the end of a transcriptional unit which signals 3′ processing and polyadenylation of a primary transcript and termination of transcription. The terminator can be derived from the natural gene, from a variety of other plant genes, or from T-DNA. The terminator to be added may be derived from, for example, the nopaline synthase or octopine synthase genes, or alternatively from another plant gene, or less preferably from any other eukaryotic gene.

[0083] Selectable Marker (Gene)/Reporter Gene

[0084] “Selectable marker”, “selectable marker gene” or “reporter gene” includes any gene that confers a phenotype on a cell in which it is expressed to facilitate the identification and/or selection of cells that are transfected or transformed with a nucleic acid construct of the invention. These marker genes enable the identification of a successful transfer of the nucleic acid molecules via a series of different principles. Suitable markers may be selected from markers that confer antibiotic or herbicide resistance, that introduce a new metabolic trait or that allow visual selection. Examples of selectable marker genes include genes conferring resistance to antibiotics (such as nptII that phosphorylates neomycin and kanamycin, or hpt, phosphorylating hygromycin, or genes conferring resistance to, for example, bleomycin, streptomycin, tetracyclin, chloramphenicol, ampicillin, gentamycin, geneticin (G418), spectinomycin or blasticidin), to herbicides (for example bar which provides resistance to Basta® aroA or gox providing resistance against glyphosate, or the genes conferring resistance to, for example, imidazolinone, phosphinothricin or sulfonylurea), or genes that provide a metabolic trait (such as manA that allows plants to use mannose as sole carbon source or xylose isomerase for the utilisation of xylose, or antinutritive markers such as the resistance to 2-deoxyglucose). Expression of visual marker genes results in the formation of colour (for example β-glucuronidase, GUS or 3-galactosidase with its coloured substrates, for example X-Gal), luminescence (such as the luciferin/luceferase system) or fluorescence (Green Fluorescent Protein, GFP, and derivatives thereof). This list represents only a small number of possible markers. The skilled worker is familiar with such markers. Different markers are preferred, depending on the organism and the selection method.

[0085] It is known that upon stable or transient integration of nucleic acids into plant cells, only a minority of the cells takes up the foreign DNA and, if desired, integrates it into its genome, depending on the expression vector used and the transfection technique used. To identify and select these integrants, a gene coding for a selectable marker (such as the ones described above) is usually introduced into the host cells together with the gene of interest. These markers can for example be used in mutants in which these genes are not functional by, for example, deletion by conventional methods. Furthermore, nucleic acid molecules encoding a selectable marker can be introduced into a host cell on the same vector that comprises the sequence encoding the polypeptides of the invention or used in the methods of the invention, or else in a separate vector. Cells which have been stably transfected with the introduced nucleic acid can be identified for example by selection (for example, cells which have integrated the selectable marker survive whereas the other cells die).

[0086] Since the marker genes, particularly genes for resistance to antibiotics and herbicides, are no longer required or are undesired in the transgenic host cell once the nucleic acids have been introduced successfully, the process according to the invention for introducing the nucleic acids advantageously employs techniques which enable the removal or excision of these marker genes. One such a method is what is known as co-transformation. The co-transformation method employs two vectors simultaneously for the transformation, one vector bearing the nucleic acid according to the invention and a second bearing the marker gene(s). A large proportion of transformants receives or, in the case of plants, comprises (up to 40% or more of the transformants), both vectors. In case of transformation with Agrobacteria, the transformants usually receive only a part of the vector, i.e. the sequence flanked by the T-DNA, which usually represents the expression cassette. The marker genes can subsequently be removed from the transformed plant by performing crosses. In another method, marker genes integrated into a transposon are used for the transformation together with desired nucleic acid (known as the Ac/Ds technology). The transformants can be crossed with a transposase source or the transformants are transformed with a nucleic acid construct conferring expression of a transposase, transiently or stable. In some cases (approx. 10%), the transposon jumps out of the genome of the host cell once transformation has taken place successfully and is lost. In a further number of cases, the transposon jumps to a different location. In these cases the marker gene must be eliminated by performing crosses. In microbiology, techniques were developed which make possible, or facilitate, the detection of such events. A further advantageous method relies on what is known as recombination systems; whose advantage is that elimination by crossing can be dispensed with. The best-known system of this type is what is known as the Cre/lox system. Cre1 is a recombinase that removes the sequences located between the loxP sequences. If the marker gene is integrated between the loxP sequences, it is removed once transformation has taken place successfully, by expression of the recombinase. Further recombination systems are the HIN/HIX, FLP/FRT and REP/STB system (Tribble et al., J. Biol. Chem., 275, 2000: 22255-22267; Velmurugan et al., J. Cell Biol., 149, 2000: 553-566). A site-specific integration into the plant genome of the nucleic acid sequences according to the invention is possible. Naturally, these methods can also be applied to microorganisms such as yeast, fungi or bacteria.

[0087] Transgenic/Transgene/Recombinant

[0088] For the purposes of the invention, “transgenic”, “transgene” or “recombinant” means with regard to, for example, a nucleic acid sequence, an expression cassette, gene construct or a vector comprising the nucleic acid sequence or an organism transformed with the nucleic acid sequences, expression cassettes or vectors according to the invention, all those constructions brought about by recombinant methods in which either
[0089] (a) the nucleic acid sequences encoding proteins useful in the methods of the invention, or
[0090] (b) genetic control sequence(s) which is operably linked with the nucleic acid sequence according to the invention, for example a promoter, or
[0091] (c) a) and b)
   are not located in their natural genetic environment or have been modified by recombinant methods, it being possible for the modification to take the form of, for example, a substitution, addition, deletion, inversion or insertion of one or more nucleotide residues. The natural genetic environment is understood as meaning the natural genomic or chromosomal locus in the original plant or the presence in a genomic library. In the case of a genomic library, the natural genetic environment of the nucleic acid sequence is preferably retained, at least in part. The environment flanks the nucleic acid sequence at least on one side and has a sequence length of at least 50 bp, preferably at least 500 bp, especially preferably at least 1000 bp, most preferably at least 5000 bp. A naturally occurring expression cassette—for example the naturally occurring combination of the natural promoter of the nucleic acid sequences with the corresponding nucleic acid sequence encoding a polypeptide useful in the methods of the present invention, as defined above—becomes a transgenic expression cassette when this expression cassette is modified by non-natural, synthetic (“artificial”) methods such as, for example, mutagenic treatment. Suitable methods are described, for example, in U.S. Pat. No. 5,565,350 or WO 00/15815.

[0092] A transgenic plant for the purposes of the invention is thus understood as meaning, as above, that the nucleic acids used in the method of the invention are not present in, or originating from, the genome of said plant, or are present in the genome of said plant but not at their natural locus in the genome of said plant, it being possible for the nucleic acids to be expressed homologously or heterologously. However, as mentioned, transgenic also means that, while the nucleic acids according to the invention or used in the inventive method are at their natural position in the genome of a plant, the sequence has been modified with regard to the natural sequence, and/or that the regulatory sequences of the natural sequences have been modified. Transgenic is preferably understood as meaning the expression of the nucleic acids according to the invention at an unnatural locus in the genome, i.e. homologous or, preferably, heterologous expression of the nucleic acids takes place. Preferred transgenic plants are mentioned herein.

[0093] It shall further be noted that in the context of the present invention, the term “isolated nucleic acid” or “isolated polypeptide” may in some instances be considered as a synonym for a “recombinant nucleic acid” or a “recombinant polypeptide”, respectively and refers to a nucleic acid or polypeptide that is not located in its natural genetic environment and/or that has been modified by recombinant methods.

[0094] Modulation

[0095] The term “modulation” means in relation to expression or gene expression, a process in which the expression level is changed by said gene expression in comparison to the control plant, the expression level may be increased or decreased. The original, unmodulated expression may be of any kind of expression of a structural RNA (rRNA, tRNA) or mRNA with subsequent translation. For the purposes of this invention, the original unmodulated expression may also be absence of any expression. The term “modulating the activity” shall mean any change of the expression of the inventive nucleic acid sequences or encoded proteins, which leads to increased yield and/or increased growth of the plants. The expression can increase from zero (absence of, or immeasurable expression) to a certain amount, or can decrease from a certain amount to immeasurable small amounts or zero.

[0096] Expression

[0097] The term “expression” or “gene expression” means the transcription of a specific gene or specific genes or specific genetic construct. The term “expression” or “gene expression” in particular means the transcription of a gene or genes or genetic construct into structural RNA (rRNA, tRNA) or mRNA with or without subsequent translation of the latter into a protein. The process includes transcription of DNA and processing of the resulting mRNA product.

[0098] Increased Expression/Overexpression

[0099] The term “increased expression” or “overexpression” as used herein means any form of expression that is additional to the original wild-type expression level. For the purposes of this invention, the original wild-type expression level might also be zero, i.e. absence of expression or immeasurable expression.

[0100] Methods for increasing expression of genes or gene products are well documented in the art and include, for example, overexpression driven by appropriate promoters, the use of transcription enhancers or translation enhancers. Isolated nucleic acids which serve as promoter or enhancer elements may be introduced in an appropriate position (typically upstream) of a non-heterologous form of a polynucleotide so as to upregulate expression of a nucleic acid encoding the polypeptide of interest. For example, endogenous promoters may be altered in vivo by mutation, deletion, and/or substitution (see, Kmiec, U.S. Pat. No. 5,565,350; Zarling et al., WO9322443), or isolated promoters may be introduced into a plant cell in the proper orientation and distance from a gene of the present invention so as to control the expression of the gene.

[0101] If polypeptide expression is desired, it is generally desirable to include a polyadenylation region at the 3′-end of a polynucleotide coding region. The polyadenylation region can be derived from the natural gene, from a variety of other plant genes, or from T-DNA. The 3′ end sequence to be added may be derived from, for example, the nopaline synthase or octopine synthase genes, or alternatively from another plant gene, or less preferably from any other eukaryotic gene.

[0102] An intron sequence may also be added to the 5′ untranslated region (UTR) or the coding sequence of the partial coding sequence to increase the amount of the mature message that accumulates in the cytosol. Inclusion of a spliceable intron in the transcription unit in both plant and animal expression constructs has been shown to increase gene expression at both the mRNA and protein levels up to 1000-fold (Buchman and Berg (1988) Mol. Cell biol. 8: 4395-4405; Callis et al. (1987) Genes Dev 1:1183-1200). Such intron enhancement of gene expression is typically greatest when placed near the 5′ end of the transcription unit. Use of the maize introns Adh1-S intron 1, 2, and 6, the Bronze-1 intron are known in the art. For general information see: The Maize Handbook, Chapter 116, Freeling and Walbot, Eds., Springer, N.Y. (1994).

[0103] Decreased Expression

[0104] Reference herein to “decreased expression” or “reduction or substantial elimination” of expression is taken to mean a decrease in endogenous gene expression and/or polypeptide levels and/or polypeptide activity relative to control plants. The reduction or substantial elimination is in increasing order of preference at least 10%, 20%, 30%, 40% or 50%, 60%, 70%, 80%, 85%, 90%, or 95%, 96%, 97%, 98%, 99% or more reduced compared to that of control plants.

[0105] For the reduction or substantial elimination of expression an endogenous gene in a plant, a sufficient length of substantially contiguous nucleotides of a nucleic acid sequence is required. In order to perform gene silencing, this may be as little as 20, 19, 18, 17, 16, 15, 14, 13, 12, 11, 10 or fewer nucleotides, alternatively this may be as much as the entire gene (including the 5′ and/or 3′ UTR, either in part or in whole). The stretch of substantially contiguous nucleotides may be derived from the nucleic acid encoding the protein of interest (target gene), or from any nucleic acid capable of encoding an orthologue, paralogue or homologue of the protein of interest. Preferably, the stretch of substantially contiguous nucleotides is capable of forming hydrogen bonds with the target gene (either sense or antisense strand), more preferably, the stretch of substantially contiguous nucleotides has, in increasing order of preference, 50%, 60%, 70%, 80%, 85%, 90%, 95%, 96%, 97%, 98%, 99%, 100% sequence identity to the target gene (either sense or antisense strand). A nucleic acid sequence encoding a (functional) polypeptide is not a requirement for the various methods discussed herein for the reduction or substantial elimination of expression of an endogenous gene.

[0106] This reduction or substantial elimination of expression may be achieved using routine tools and techniques. A preferred method for the reduction or substantial elimination of endogenous gene expression is by introducing and expressing in a plant a genetic construct into which the nucleic acid (in this case a stretch of substantially contiguous nucleotides derived from the gene of interest, or from any nucleic acid capable of encoding an orthologue, paralogue or homologue of any one of the protein of interest) is cloned as an inverted repeat (in part or completely), separated by a spacer (non-coding DNA).

[0107] In such a preferred method, expression of the endogenous gene is reduced or substantially eliminated through RNA-mediated silencing using an inverted repeat of a nucleic acid or a part thereof (in this case a stretch of substantially contiguous nucleotides derived from the gene of interest, or from any nucleic acid capable of encoding an orthologue, paralogue or homologue of the protein of interest), preferably capable of forming a hairpin structure. The inverted repeat is cloned in an expression vector comprising control sequences. A non-coding DNA nucleic acid sequence (a spacer, for example a matrix attachment region fragment (MAR), an intron, a polylinker, etc.) is located between the two inverted nucleic acids forming the inverted repeat. After transcription of the inverted repeat, a chimeric RNA with a self-complementary structure is formed (partial or complete). This double-stranded RNA structure is referred to as the hairpin RNA (hpRNA). The hpRNA is processed by the plant into siRNAs that are incorporated into an RNA-induced silencing complex (RISC). The RISC further cleaves the mRNA transcripts, thereby substantially reducing the number of mRNA transcripts to be translated into polypeptides. For further general details see for example, Grierson et al. (1998) WO 98/53083; Waterhouse et al. (1999) WO 99/53050).

[0108] Performance of the methods of the invention does not rely on introducing and expressing in a plant a genetic construct into which the nucleic acid is cloned as an inverted repeat, but any one or more of several well-known “gene silencing” methods may be used to achieve the same effects.

[0109] One such method for the reduction of endogenous gene expression is RNA-mediated silencing of gene expression (downregulation). Silencing in this case is triggered in a plant by a double stranded RNA sequence (dsRNA) that is substantially similar to the target endogenous gene. This dsRNA is further processed by the plant into about 20 to about 26 nucleotides called short interfering RNAs (siRNAs). The siRNAs are incorporated into an RNA-induced silencing complex (RISC) that cleaves the mRNA transcript of the endogenous target gene, thereby substantially reducing the number of mRNA transcripts to be translated into a polypeptide. Preferably, the double stranded RNA sequence corresponds to a target gene.

[0110] Another example of an RNA silencing method involves the introduction of nucleic acid sequences or parts thereof (in this case a stretch of substantially contiguous nucleotides derived from the gene of interest, or from any nucleic acid capable of encoding an orthologue, paralogue or homologue of the protein of interest) in a sense orientation into a plant. “Sense orientation” refers to a DNA sequence that is homologous to an mRNA transcript thereof. Introduced into a plant would therefore be at least one copy of the nucleic acid sequence. The additional nucleic acid sequence will reduce expression of the endogenous gene, giving rise to a phenomenon known as co-suppression. The reduction of gene expression will be more pronounced if several additional copies of a nucleic acid sequence are introduced into the plant, as there is a positive correlation between high transcript levels and the triggering of co-suppression.

[0111] Another example of an RNA silencing method involves the use of antisense nucleic acid sequences. An “antisense” nucleic acid sequence comprises a nucleotide sequence that is complementary to a “sense” nucleic acid sequence encoding a protein, i.e. complementary to the coding strand of a double-stranded cDNA molecule or complementary to an mRNA transcript sequence. The antisense nucleic acid sequence is preferably complementary to the endogenous gene to be silenced. The complementarity may be located in the “coding region” and/or in the “non-coding region” of a gene. The term “coding region” refers to a region of the nucleotide sequence comprising codons that are translated into amino acid residues. The term “non-coding region” refers to 5′ and 3′ sequences that flank the coding region that are transcribed but not translated into amino acids (also referred to as 5′ and 3′ untranslated regions).

[0112] Antisense nucleic acid sequences can be designed according to the rules of Watson and Crick base pairing. The antisense nucleic acid sequence may be complementary to the entire nucleic acid sequence (in this case a stretch of substantially contiguous nucleotides derived from the gene of interest, or from any nucleic acid capable of encoding an orthologue, paralogue or homologue of the protein of interest), but may also be an oligonucleotide that is antisense to only a part of the nucleic acid sequence (including the mRNA 5′ and 3′ UTR). For example, the antisense oligonucleotide sequence may be complementary to the region surrounding the translation start site of an mRNA transcript encoding a polypeptide. The length of a suitable antisense oligonucleotide sequence is known in the art and may start from about 50, 45, 40, 35, 30, 25, 20, 15 or 10 nucleotides in length or less. An antisense nucleic acid sequence according to the invention may be constructed using chemical synthesis and enzymatic ligation reactions using methods known in the art. For example, an antisense nucleic acid sequence (e.g., an antisense oligonucleotide sequence) may be chemically synthesized using naturally occurring nucleotides or variously modified nucleotides designed to increase the biological stability of the molecules or to increase the physical stability of the duplex formed between the antisense and sense nucleic acid sequences, e.g., phosphorothioate derivatives and acridine substituted nucleotides may be used. Examples of modified nucleotides that may be used to generate the antisense nucleic acid sequences are well known in the art. Known nucleotide modifications include methylation, cyclization and ‘caps’ and substitution of one or more of the naturally occurring nucleotides with an analogue such as inosine. Other modifications of nucleotides are well known in the art.

[0113] The antisense nucleic acid sequence can be produced biologically using an expression vector into which a nucleic acid sequence has been subcloned in an antisense orientation (i.e., RNA transcribed from the inserted nucleic acid will be of an antisense orientation to a target nucleic acid of interest). Preferably, production of antisense nucleic acid sequences in plants occurs by means of a stably integrated nucleic acid construct comprising a promoter, an operably linked antisense oligonucleotide, and a terminator.

[0114] The nucleic acid molecules used for silencing in the methods of the invention (whether introduced into a plant or generated in situ) hybridize with or bind to mRNA transcripts and/or genomic DNA encoding a polypeptide to thereby inhibit expression of the protein, e.g., by inhibiting transcription and/or translation. The hybridization can be by conventional nucleotide complementarity to form a stable duplex, or, for example, in the case of an antisense nucleic acid sequence which binds to DNA duplexes, through specific interactions in the major groove of the double helix. Antisense nucleic acid sequences may be introduced into a plant by transformation or direct injection at a specific tissue site. Alternatively, antisense nucleic acid sequences can be modified to target selected cells and then administered systemically. For example, for systemic administration, antisense nucleic acid sequences can be modified such that they specifically bind to receptors or antigens expressed on a selected cell surface, e.g., by linking the antisense nucleic acid sequence to peptides or antibodies which bind to cell surface receptors or antigens. The antisense nucleic acid sequences can also be delivered to cells using the vectors described herein.

[0115] According to a further aspect, the antisense nucleic acid sequence is an a-anomeric nucleic acid sequence. An a-anomeric nucleic acid sequence forms specific double-stranded hybrids with complementary RNA in which, contrary to the usual b-units, the strands run parallel to each other (Gaultier et al. (1987) Nucl Ac Res 15: 6625-6641). The antisense nucleic acid sequence may also comprise a 2′-o-methylribonucleotide (Inoue et al. (1987) Nucl Ac Res 15, 6131-6148) or a chimeric RNA-DNA analogue (Inoue et al. (1987) FEBS Lett. 215, 327-330).

[0116] The reduction or substantial elimination of endogenous gene expression may also be performed using ribozymes. Ribozymes are catalytic RNA molecules with ribonuclease activity that are capable of cleaving a single-stranded nucleic acid sequence, such as an mRNA, to which they have a complementary region. Thus, ribozymes (e.g., hammerhead ribozymes (described in Haselhoff and Gerlach (1988) Nature 334, 585-591) can be used to catalytically cleave mRNA transcripts encoding a polypeptide, thereby substantially reducing the number of mRNA transcripts to be translated into a polypeptide. A ribozyme having specificity for a nucleic acid sequence can be designed (see for example: Cech et al. U.S. Pat. No. 4,987,071; and Cech et al. U.S. Pat. No. 5,116,742). Alternatively, mRNA transcripts corresponding to a nucleic acid sequence can be used to select a catalytic RNA having a specific ribonuclease activity from a pool of RNA molecules (Bartel and Szostak (1993) Science 261, 1411-1418). The use of ribozymes for gene silencing in plants is known in the art (e.g., Atkins et al. (1994) WO 94/00012; Lenne et al. (1995) WO 95/03404; Lutziger et al. (2000) WO 00/00619; Prinsen et al. (1997) WO 97/13865 and Scott et al. (1997) WO 97/38116).

[0117] Gene silencing may also be achieved by insertion mutagenesis (for example, T-DNA insertion or transposon insertion) or by strategies as described by, among others, Angell and Baulcombe ((1999) Plant J 20(3): 357-62), (Amplicon VIGS WO 98/36083), or Baulcombe (WO 99/15682).

[0118] Gene silencing may also occur if there is a mutation on an endogenous gene and/or a mutation on an isolated gene/nucleic acid subsequently introduced into a plant. The reduction or substantial elimination may be caused by a non-functional polypeptide. For example, the polypeptide may bind to various interacting proteins; one or more mutation(s) and/or truncation(s) may therefore provide for a polypeptide that is still able to bind interacting proteins (such as receptor proteins) but that cannot exhibit its normal function (such as signalling ligand).

[0119] A further approach to gene silencing is by targeting nucleic acid sequences complementary to the regulatory region of the gene (e.g., the promoter and/or enhancers) to form triple helical structures that prevent transcription of the gene in target cells. See Helene, C., Anticancer Drug Res. 6, 569-84, 1991; Helene et al., Ann. N.Y. Acad. Sci. 660, 27-36 1992; and Maher, L. J. Bioassays 14, 807-15, 1992.

[0120] Other methods, such as the use of antibodies directed to an endogenous polypeptide for inhibiting its function in planta, or interference in the signalling pathway in which a polypeptide is involved, will be well known to the skilled man. In particular, it can be envisaged that manmade molecules may be useful for inhibiting the biological function of a target polypeptide, or for interfering with the signalling pathway in which the target polypeptide is involved.

[0121] Alternatively, a screening program may be set up to identify in a plant population natural variants of a gene, which variants encode polypeptides with reduced activity. Such natural variants may also be used for example, to perform homologous recombination.

[0122] Artificial and/or natural microRNAs (miRNAs) may be used to knock out gene expression and/or mRNA translation. Endogenous miRNAs are single stranded small RNAs of typically 19-24 nucleotides long. They function primarily to regulate gene expression and/or mRNA translation. Most plant microRNAs (miRNAs) have perfect or near-perfect complementarity with their target sequences. However, there are natural targets with up to five mismatches. They are processed from longer non-coding RNAs with characteristic fold-back structures by double-strand specific RNases of the Dicer family. Upon processing, they are incorporated in the RNA-induced silencing complex (RISC) by binding to its main component, an Argonaute protein. MiRNAs serve as the specificity components of RISC, since they base-pair to target nucleic acids, mostly mRNAs, in the cytoplasm. Subsequent regulatory events include target mRNA cleavage and destruction and/or translational inhibition. Effects of miRNA overexpression are thus often reflected in decreased mRNA levels of target genes.

[0123] Artificial microRNAs (amiRNAs), which are typically 21 nucleotides in length, can be genetically engineered specifically to negatively regulate gene expression of single or multiple genes of interest. Determinants of plant microRNA target selection are well known in the art. Empirical parameters for target recognition have been defined and can be used to aid in the design of specific amiRNAs, (Schwab et al., Dev. Cell 8, 517-527, 2005). Convenient tools for design and generation of amiRNAs and their precursors are also available to the public (Schwab et al., Plant Cell 18, 1121-1133, 2006).

[0124] For optimal performance, the gene silencing techniques used for reducing expression in a plant of an endogenous gene requires the use of nucleic acid sequences from monocotyledonous plants for transformation of monocotyledonous plants, and from dicotyledonous plants for transformation of dicotyledonous plants. Preferably, a nucleic acid sequence from any given plant species is introduced into that same species. For example, a nucleic acid sequence from rice is transformed into a rice plant. However, it is not an absolute requirement that the nucleic acid sequence to be introduced originates from the same plant species as the plant in which it will be introduced. It is sufficient that there is substantial homology between the endogenous target gene and the nucleic acid to be introduced.

[0125] Described above are examples of various methods for the reduction or substantial elimination of expression in a plant of an endogenous gene. A person skilled in the art would readily be able to adapt the aforementioned methods for silencing so as to achieve reduction of expression of an endogenous gene in a whole plant or in parts thereof through the use of an appropriate promoter, for example.

[0126] Transformation

[0127] The term “introduction” or “transformation” as referred to herein encompasses the transfer of an exogenous polynucleotide into a host cell, irrespective of the method used for transfer. Plant tissue capable of subsequent clonal propagation, whether by organogenesis or embryogenesis, may be transformed with a genetic construct of the present invention and a whole plant regenerated there from. The particular tissue chosen will vary depending on the clonal propagation systems available for, and best suited to, the particular species being transformed. Exemplary tissue targets include leaf disks, pollen, embryos, cotyledons, hypocotyls, megagametophytes, callus tissue, existing meristematic tissue (e.g., apical meristem, axillary buds, and root meristems), and induced meristem tissue (e.g., cotyledon meristem and hypocotyl meristem). The polynucleotide may be transiently or stably introduced into a host cell and may be maintained non-integrated, for example, as a plasmid. Alternatively, it may be integrated into the host genome. The resulting transformed plant cell may then be used to regenerate a transformed plant in a manner known to persons skilled in the art.

[0128] The transfer of foreign genes into the genome of a plant is called transformation. Transformation of plant species is now a fairly routine technique. Advantageously, any of several transformation methods may be used to introduce the gene of interest into a suitable ancestor cell. The methods described for the transformation and regeneration of plants from plant tissues or plant cells may be utilized for transient or for stable transformation. Transformation methods include the use of liposomes, electroporation, chemicals that increase free DNA uptake, injection of the DNA directly into the plant, particle gun bombardment, transformation using viruses or pollen and microprojection. Methods may be selected from the calcium/polyethylene glycol method for protoplasts (Krens, F. A. et al., (1982) Nature 296, 72-74; Negrutiu I et al. (1987) Plant Mol Biol 8: 363-373); electroporation of protoplasts (Shillito R. D. et al. (1985) Bio/Technol 3, 1099-1102); microinjection into plant material (Crossway A et al., (1986) Mol. Gen Genet 202: 179-185); DNA or RNA-coated particle bombardment (Klein T M et al., (1987) Nature 327: 70) infection with (non-integrative) viruses and the like. Transgenic plants, including transgenic crop plants, are preferably produced via Agrobacterium-mediated transformation. An advantageous transformation method is the transformation in planta. To this end, it is possible, for example, to allow the agrobacteria to act on plant seeds or to inoculate the plant meristem with agrobacteria. It has proved particularly expedient in accordance with the invention to allow a suspension of transformed agrobacteria to act on the intact plant or at least on the flower primordia. The plant is subsequently grown on until the seeds of the treated plant are obtained (Clough and Bent, Plant J. (1998) 16, 735-743). Methods for Agrobacterium-mediated transformation of rice include well known methods for rice transformation, such as those described in any of the following: European patent application EP 1198985 A1, Aldemita and Hodges (Planta 199: 612-617, 1996); Chan et al. (Plant Mol Biol 22 (3): 491-506, 1993), Hiei et al. (Plant J 6 (2): 271-282, 1994), which disclosures are incorporated by reference herein as if fully set forth. In the case of corn transformation, the preferred method is as described in either Ishida et al. (Nat. Biotechnol 14(6): 745-50, 1996) or Frame et al. (Plant Physiol 129(1): 13-22, 2002), which disclosures are incorporated by reference herein as if fully set forth. Said methods are further described by way of example in B. Jenes et al., Techniques for Gene Transfer, in: Transgenic Plants, Vol. 1, Engineering and Utilization, eds. S. D. Kung and R. Wu, Academic Press (1993) 128-143 and in Potrykus Annu. Rev. Plant Physiol. Plant Molec. Biol. 42 (1991) 205-225). The nucleic acids or the construct to be expressed is preferably cloned into a vector, which is suitable for transforming Agrobacterium tumefaciens, for example pBin19 (Bevan et al., Nucl. Acids Res. 12 (1984) 8711). Agrobacteria transformed by such a vector can then be used in known manner for the transformation of plants, such as plants used as a model, like Arabidopsis (Arabidopsis thaliana is within the scope of the present invention not considered as a crop plant), or crop plants such as, by way of example, tobacco plants, for example by immersing bruised leaves or chopped leaves in an agrobacterial solution and then culturing them in suitable media. The transformation of plants by means of Agrobacterium tumefaciens is described, for example, by Höfgen and Willmitzer in Nucl. Acid Res. (1988) 16, 9877 or is known inter alia from F. F. White, Vectors for Gene Transfer in Higher Plants; in Transgenic Plants, Vol. 1, Engineering and Utilization, eds. S. D. Kung and R. Wu, Academic Press, 1993, pp. 15-38.

[0129] In addition to the transformation of somatic cells, which then have to be regenerated into intact plants, it is also possible to transform the cells of plant meristems and in particular those cells which develop into gametes. In this case, the transformed gametes follow the natural plant development, giving rise to transgenic plants. Thus, for example, seeds of Arabidopsis are treated with agrobacteria and seeds are obtained from the developing plants of which a certain proportion is transformed and thus transgenic [Feldman, K A and Marks M D (1987). Mol Gen Genet 208:1-9; Feldmann K (1992). In: C Koncz, N-H Chua and J Shell, eds, Methods in Arabidopsis Research. Word Scientific, Singapore, pp. 274-289]. Alternative methods are based on the repeated removal of the inflorescences and incubation of the excision site in the center of the rosette with transformed agrobacteria, whereby transformed seeds can likewise be obtained at a later point in time (Chang (1994). Plant J. 5: 551-558; Katavic (1994). Mol Gen Genet, 245: 363-370). However, an especially effective method is the vacuum infiltration method with its modifications such as the “floral dip” method. In the case of vacuum infiltration of Arabidopsis, intact plants under reduced pressure are treated with an agrobacterial suspension [Bechthold, N (1993). C R Acad Sci Paris Life Sci, 316: 1194-1199], while in the case of the “floral dip” method the developing floral tissue is incubated briefly with a surfactant-treated agrobacterial suspension [Clough, S J and Bent A F (1998) The Plant J. 16, 735-743]. A certain proportion of transgenic seeds are harvested in both cases, and these seeds can be distinguished from non-transgenic seeds by growing under the above-described selective conditions. In addition the stable transformation of plastids is of advantages because plastids are inherited maternally is most crops reducing or eliminating the risk of transgene flow through pollen. The transformation of the chloroplast genome is generally achieved by a process which has been schematically displayed in Klaus et al., 2004 [Nature Biotechnology 22 (2), 225-229]. Briefly the sequences to be transformed are cloned together with a selectable marker gene between flanking sequences homologous to the chloroplast genome. These homologous flanking sequences direct site specific integration into the plastome. Plastidal transformation has been described for many different plant species and an overview is given in Bock (2001) Transgenic plastids in basic research and plant biotechnology. J Mol Biol. 2001 Sep. 21; 312 (3):425-38 or Maliga, P (2003) Progress towards commercialization of plastid transformation technology. Trends Biotechnol. 21, 20-28. Further biotechnological progress has recently been reported in form of marker free plastid transformants, which can be produced by a transient co-integrated maker gene (Klaus et al., 2004, Nature Biotechnology 22(2), 225-229).

[0130] The genetically modified plant cells can be regenerated via all methods with which the skilled worker is familiar. Suitable methods can be found in the abovementioned publications by S. D. Kung and R. Wu, Potrykus or Höfgen and Willmitzer.

[0131] Generally after transformation, plant cells or cell groupings are selected for the presence of one or more markers which are encoded by plant-expressible genes co-transferred with the gene of interest, following which the transformed material is regenerated into a whole plant. To select transformed plants, the plant material obtained in the transformation is, as a rule, subjected to selective conditions so that transformed plants can be distinguished from untransformed plants. For example, the seeds obtained in the above-described manner can be planted and, after an initial growing period, subjected to a suitable selection by spraying. A further possibility consists in growing the seeds, if appropriate after sterilization, on agar plates using a suitable selection agent so that only the transformed seeds can grow into plants. Alternatively, the transformed plants are screened for the presence of a selectable marker such as the ones described above.

[0132] Following DNA transfer and regeneration, putatively transformed plants may also be evaluated, for instance using Southern analysis, for the presence of the gene of interest, copy number and/or genomic organisation. Alternatively or additionally, expression levels of the newly introduced DNA may be monitored using Northern and/or Western analysis, both techniques being well known to persons having ordinary skill in the art.

[0133] The generated transformed plants may be propagated by a variety of means, such as by clonal propagation or classical breeding techniques. For example, a first generation (or T1) transformed plant may be selfed and homozygous second-generation (or T2) transformants selected, and the T2 plants may then further be propagated through classical breeding techniques. The generated transformed organisms may take a variety of forms. For example, they may be chimeras of transformed cells and non-transformed cells; clonal transformants (e.g., all cells transformed to contain the expression cassette); grafts of transformed and untransformed tissues (e.g., in plants, a transformed rootstock grafted to an untransformed scion).

[0134] T-DNA Activation Tagging

[0135] T-DNA activation tagging (Hayashi et al. Science (1992) 1350-1353), involves insertion of T-DNA, usually containing a promoter (may also be a translation enhancer or an intron), in the genomic region of the gene of interest or 10 kb up- or downstream of the coding region of a gene in a configuration such that the promoter directs expression of the targeted gene. Typically, regulation of expression of the targeted gene by its natural promoter is disrupted and the gene falls under the control of the newly introduced promoter. The promoter is typically embedded in a T-DNA. This T-DNA is randomly inserted into the plant genome, for example, through Agrobacterium infection and leads to modified expression of genes near the inserted T-DNA. The resulting transgenic plants show dominant phenotypes due to modified expression of genes close to the introduced promoter.

[0136] Tilling

[0137] The term “TILLING” is an abbreviation of “Targeted Induced Local Lesions In Genomes” and refers to a mutagenesis technology useful to generate and/or identify nucleic acids encoding proteins with modified expression and/or activity. TILLING also allows selection of plants carrying such mutant variants. These mutant variants may exhibit modified expression, either in strength or in location or in timing (if the mutations affect the promoter for example). These mutant variants may exhibit higher activity than that exhibited by the gene in its natural form. TILLING combines high-density mutagenesis with high-throughput screening methods. The steps typically followed in TILLING are: (a) EMS mutagenesis (Redei G P and Koncz C (1992) In Methods in Arabidopsis Research, Koncz C, Chua N H, Schell J, eds. Singapore, World Scientific Publishing Co, pp. 16-82; Feldmann et al., (1994) In Meyerowitz E M, Somerville C R, eds, Arabidopsis. Cold Spring Harbor Laboratory Press, Cold Spring Harbor, N.Y., pp 137-172; Lightner J and Caspar T (1998) In J Martinez-Zapater, J Salinas, eds, Methods on Molecular Biology, Vol. 82. Humana Press, Totowa, N.J., pp 91-104); (b) DNA preparation and pooling of individuals; (c) PCR amplification of a region of interest; (d) denaturation and annealing to allow formation of heteroduplexes; (e) DHPLC, where the presence of a heteroduplex in a pool is detected as an extra peak in the chromatogram; (f) identification of the mutant individual; and (g) sequencing of the mutant PCR product. Methods for TILLING are well known in the art (McCallum et al., (2000) Nat Biotechnol 18: 455-457; reviewed by Stemple (2004) Nat Rev Genet 5(2): 145-50).

[0138] Homologous Recombination

[0139] Homologous recombination allows introduction in a genome of a selected nucleic acid at a defined selected position. Homologous recombination is a standard technology used routinely in biological sciences for lower organisms such as yeast or the moss Physcomitrella. Methods for performing homologous recombination in plants have been described not only for model plants (Offring a et al. (1990) EMBO J 9(10): 3077-84) but also for crop plants, for example rice (Terada et al. (2002) Nat Biotech 20(10): 1030-4; lida and Terada (2004) Curr Opin Biotech 15(2): 132-8), and approaches exist that are generally applicable regardless of the target organism (Miller et al, Nature Biotechnol. 25, 778-785, 2007).

[0140] Yield Related Traits

[0141] Yield related traits are traits or features which are related to plant yield. Yield-related traits may comprise one or more of the following non-limitative list of features: early flowering time, yield, biomass, seed yield, early vigour, greenness index, increased growth rate, improved agronomic traits, such as e.g. improved Water Use Efficiency (WUE), improved Nitrogen Use Efficiency (NUE) or increased tolerance to submergence (which leads to increased yield in rice), etc.

[0142] Yield

[0143] The term “yield” in general means a measurable produce of economic value, typically related to a specified crop, to an area, and to a period of time. Individual plant parts directly contribute to yield based on their number, size and/or weight, or the actual yield is the yield per square meter for a crop and year, which is determined by dividing total production (includes both harvested and appraised production) by planted square meters.

[0144] The terms “yield” of a plant and “plant yield” are used interchangeably herein and are meant to refer to vegetative biomass such as root and/or shoot biomass, to reproductive organs, and/or to propagules such as seeds of that plant.

[0145] Flowers in maize are unisexual; male inflorescences (tassels) originate from the apical stem and female inflorescences (ears) arise from axillary bud apices. The female inflorescence produces pairs of spikelets on the surface of a central axis (cob). Each of the female spikelets encloses two fertile florests, one of whose will usually mature into a maize kernel once fertilized. Hence a yield increase in maize may be manifested as one or more of the following: increase in the number of plants established per square meter, an increase in the number of ears per plant, an increase in the number of rows, number of kernels per row, kernel weight, thousand kernel weight, ear length/diameter, increase in the seed filling rate, which is the number of filled florets (i.e. florets containing seed) divided by the total number of florets and multiplied by 100), among others.

[0146] Inflorescences in rice plants are called panicles. The panicle bears spikelets. The spikelet is the basic unit of the panicles and consists of a pedicel and a floret. The floret is born on the pedicel. A floret includes a flower that is covered by two protective glumes: a larger glume (the lemma) and a shorter glume (the palea). Hence, taking rice as an example, a yield increase may manifest itself as an increase in one or more of the following: number of plants per square meter, number of panicles per plant, panicle length, number of spikelets per panicle, number of flowers (or florets) per panicle, increase in the seed filling rate which is the number of filled florets (i.e. florets containing seeds divided by the total number of florets and multiplied by 100), increase in thousand kernel weight, among others. In rice, submergence tolerance may also result in increased yield.

[0147] Early Flowering Time

[0148] Plants having an “early flowering time” as used herein are plants which start to flower earlier than control plants. Hence this term refers to plants that show an earlier start of flowering. Flowering time of plants can be assessed by counting the number of days (“time to flower”) between sowing and the emergence of a first inflorescence. The “flowering time” of a plant can for instance be determined using the method as described in WO 2007/093444.

[0149] Early Vigour

[0150] “Early vigour” refers to active healthy well-balanced growth especially during early stages of plant growth, and may result from increased plant fitness due to, for example, the plants being better adapted to their environment (i.e. optimizing the use of energy resources and partitioning between shoot and root). Plants having early vigour also show increased seedling survival and a better establishment of the crop, which often results in highly uniform fields (with the crop growing in uniform manner, i.e. with the majority of plants reaching the various stages of development at substantially the same time), and often better and higher yield. Therefore, early vigour may be determined by measuring various factors, such as thousand kernel weight, percentage germination, percentage emergence, seedling growth, seedling height, root length, root and shoot biomass and many more.

[0151] Increased Growth Rate

[0152] The increased growth rate may be specific to one or more parts of a plant (including seeds), or may be throughout substantially the whole plant. Plants having an increased growth rate may have a shorter life cycle. The life cycle of a plant may be taken to mean the time needed to grow from a dry mature seed up to the stage where the plant has produced dry mature seeds, similar to the starting material. This life cycle may be influenced by factors such as speed of germination, early vigour, growth rate, greenness index, flowering time and speed of seed maturation. The increase in growth rate may take place at one or more stages in the life cycle of a plant or during substantially the whole plant life cycle. Increased growth rate during the early stages in the life cycle of a plant may reflect enhanced vigour. The increase in growth rate may alter the harvest cycle of a plant allowing plants to be sown later and/or harvested sooner than would otherwise be possible (a similar effect may be obtained with earlier flowering time). If the growth rate is sufficiently increased, it may allow for the further sowing of seeds of the same plant species (for example sowing and harvesting of rice plants followed by sowing and harvesting of further rice plants all within one conventional growing period). Similarly, if the growth rate is sufficiently increased, it may allow for the further sowing of seeds of different plants species (for example the sowing and harvesting of corn plants followed by, for example, the sowing and optional harvesting of soybean, potato or any other suitable plant). Harvesting additional times from the same rootstock in the case of some crop plants may also be possible. Altering the harvest cycle of a plant may lead to an increase in annual biomass production per square meter (due to an increase in the number of times (say in a year) that any particular plant may be grown and harvested). An increase in growth rate may also allow for the cultivation of transgenic plants in a wider geographical area than their wild-type counterparts, since the territorial limitations for growing a crop are often determined by adverse environmental conditions either at the time of planting (early season) or at the time of harvesting (late season). Such adverse conditions may be avoided if the harvest cycle is shortened. The growth rate may be determined by deriving various parameters from growth curves, such parameters may be: T-Mid (the time taken for plants to reach 50% of their maximal size) and T-90 (time taken for plants to reach 90% of their maximal size), amongst others.

[0153] Stress Resistance

[0154] An increase in yield and/or growth rate occurs whether the plant is under non-stress conditions or whether the plant is exposed to various stresses compared to control plants. Plants typically respond to exposure to stress by growing more slowly. In conditions of severe stress, the plant may even stop growing altogether. Mild stress on the other hand is defined herein as being any stress to which a plant is exposed which does not result in the plant ceasing to grow altogether without the capacity to resume growth. Mild stress in the sense of the invention leads to a reduction in the growth of the stressed plants of less than 40%, 35%, 30% or 25%, more preferably less than 20% or 15% in comparison to the control plant under non-stress conditions. Due to advances in agricultural practices (irrigation, fertilization, pesticide treatments) severe stresses are not often encountered in cultivated crop plants. As a consequence, the compromised growth induced by mild stress is often an undesirable feature for agriculture. “Mild stresses” are the everyday biotic and/or abiotic (environmental) stresses to which a plant is exposed. Abiotic stresses may be due to drought or excess water, anaerobic stress, salt stress, chemical toxicity, oxidative stress and hot, cold or freezing temperatures.

[0155] “Biotic stresses” are typically those stresses caused by pathogens, such as bacteria, viruses, fungi, nematodes and insects.

[0156] The “abiotic stress” may be an osmotic stress caused by a water stress, e.g. due to drought, salt stress, or freezing stress. Abiotic stress may also be an oxidative stress or a cold stress. “Freezing stress” is intended to refer to stress due to freezing temperatures, i.e. temperatures at which available water molecules freeze and turn into ice. “Cold stress”, also called “chilling stress”, is intended to refer to cold temperatures, e.g. temperatures below 10°, or preferably below 5° C., but at which water molecules do not freeze. As reported in Wang et al. (Planta (2003) 218: 1-14), abiotic stress leads to a series of morphological, physiological, biochemical and molecular changes that adversely affect plant growth and productivity. Drought, salinity, extreme temperatures and oxidative stress are known to be interconnected and may induce growth and cellular damage through similar mechanisms. Rabbani et al. (Plant Physiol (2003) 133: 1755-1767) describes a particularly high degree of “cross talk” between drought stress and high-salinity stress. For example, drought and/or salinisation are manifested primarily as osmotic stress, resulting in the disruption of homeostasis and ion distribution in the cell. Oxidative stress, which frequently accompanies high or low temperature, salinity or drought stress, may cause denaturing of functional and structural proteins. As a consequence, these diverse environmental stresses often activate similar cell signalling pathways and cellular responses, such as the production of stress proteins, up-regulation of anti-oxidants, accumulation of compatible solutes and growth arrest. The term “non-stress” conditions as used herein are those environmental conditions that allow optimal growth of plants. Persons skilled in the art are aware of normal soil conditions and climatic conditions for a given location. Plants with optimal growth conditions, (grown under non-stress conditions) typically yield in increasing order of preference at least 97%, 95%, 92%, 90%, 87%, 85%, 83%, 80%, 77% or 75% of the average production of such plant in a given environment. Average production may be calculated on harvest and/or season basis. Persons skilled in the art are aware of average yield productions of a crop.

[0157] In particular, the methods of the present invention may be performed under non-stress conditions. In an example, the methods of the present invention may be performed under non-stress conditions such as mild drought to give plants having increased yield relative to control plants.

[0158] In another embodiment, the methods of the present invention may be performed under stress conditions.

[0159] In an example, the methods of the present invention may be performed under stress conditions such as drought to give plants having increased yield relative to control plants.

[0160] In another example, the methods of the present invention may be performed under stress conditions such as nutrient deficiency to give plants having increased yield relative to control plants.

[0161] Nutrient deficiency may result from a lack of nutrients such as nitrogen, phosphates and other phosphorous-containing compounds, potassium, calcium, magnesium, manganese, iron and boron, amongst others.

[0162] In yet another example, the methods of the present invention may be performed under stress conditions such as salt stress to give plants having increased yield relative to control plants. The term salt stress is not restricted to common salt (NaCl), but may be any one or more of: NaCI, KCI, LiCI, MgCl2, CaCl2, amongst others.

[0163] In yet another example, the methods of the present invention may be performed under stress conditions such as cold stress or freezing stress to give plants having increased yield relative to control plants.

[0164] Increase/Improve/Enhance

[0165] The terms “increase”, “improve” or “enhance” are interchangeable and shall mean in the sense of the application at least a 3%, 4%, 5%, 6%, 7%, 8%, 9% or 10%, preferably at least 15% or 20%, more preferably 25%, 30%, 35% or 40% more yield and/or growth in comparison to control plants as defined herein.

[0166] Seed Yield

[0167] Increased seed yield may manifest itself as one or more of the following:
[0168] (a) an increase in seed biomass (total seed weight) which may be on an individual seed basis and/or per plant and/or per square meter;
[0169] (b) increased number of flowers per plant;
[0170] (c) increased number of seeds;
[0171] (d) increased seed filling rate (which is expressed as the ratio between the number of filled florets divided by the total number of florets);
[0172] (e) increased harvest index, which is expressed as a ratio of the yield of harvestable parts, such as seeds, divided by the biomass of aboveground plant parts; and
[0173] (f) increased thousand kernel weight (TKW), which is extrapolated from the number of seeds counted and their total weight. An increased TKW may result from an increased seed size and/or seed weight, and may also result from an increase in embryo and/or endosperm size.

[0174] The terms “filled florets” and “filled seeds” may be considered synonyms.

[0175] An increase in seed yield may also be manifested as an increase in seed size and/or seed volume. Furthermore, an increase in seed yield may also manifest itself as an increase in seed area and/or seed length and/or seed width and/or seed perimeter.

[0176] Greenness Index

[0177] The “greenness index” as used herein is calculated from digital images of plants. For each pixel belonging to the plant object on the image, the ratio of the green value versus the red value (in the RGB model for encoding color) is calculated. The greenness index is expressed as the percentage of pixels for which the green-to-red ratio exceeds a given threshold. Under normal growth conditions, under salt stress growth conditions, and under reduced nutrient availability growth conditions, the greenness index of plants is measured in the last imaging before flowering. In contrast, under drought stress growth conditions, the greenness index of plants is measured in the first imaging after drought.

[0178] Biomass

[0179] The term “biomass” as used herein is intended to refer to the total weight of a plant. Within the definition of biomass, a distinction may be made between the biomass of one or more parts of a plant, which may include any one or more of the following:
[0180] aboveground parts such as but not limited to shoot biomass, seed biomass, leaf biomass, etc.;
[0181] aboveground harvestable parts such as but not limited to shoot biomass, seed biomass, leaf biomass, etc.:
[0182] parts below ground, such as but not limited to root biomass, etc.;
[0183] harvestable parts below ground, such as but not limited to root biomass, tubers, bulbs, etc.;
[0184] vegetative biomass such as root biomass, shoot biomass, etc.;
[0185] reproductive organs; and
[0186] propagules such as seed.

[0187] Marker Assisted Breeding

[0188] Such breeding programmes sometimes require introduction of allelic variation by mutagenic treatment of the plants, using for example EMS mutagenesis; alternatively, the programme may start with a collection of allelic variants of so called “natural” origin caused unintentionally. Identification of allelic variants then takes place, for example, by PCR. This is followed by a step for selection of superior allelic variants of the sequence in question and which give increased yield. Selection is typically carried out by monitoring growth performance of plants containing different allelic variants of the sequence in question. Growth performance may be monitored in a greenhouse or in the field. Further optional steps include crossing plants in which the superior allelic variant was identified with another plant. This could be used, for example, to make a combination of interesting phenotypic features.

[0189] Use as Probes in (Gene Mapping)

[0190] Use of nucleic acids encoding the protein of interest for genetically and physically mapping the genes requires only a nucleic acid sequence of at least 15 nucleotides in length. These nucleic acids may be used as restriction fragment length polymorphism (RFLP) markers. Southern blots (Sambrook J, Fritsch E F and Maniatis T (1989) Molecular Cloning, A Laboratory Manual) of restriction-digested plant genomic DNA may be probed with the nucleic acids encoding the protein of interest. The resulting banding patterns may then be subjected to genetic analyses using computer programs such as MapMaker (Lander et al. (1987) Genomics 1: 174-181) in order to construct a genetic map. In addition, the nucleic acids may be used to probe Southern blots containing restriction endonuclease-treated genomic DNAs of a set of individuals representing parent and progeny of a defined genetic cross. Segregation of the DNA polymorphisms is noted and used to calculate the position of the nucleic acid encoding the protein of interest in the genetic map previously obtained using this population (Botstein et al. (1980) Am. J. Hum. Genet. 32:314-331).

[0191] The production and use of plant gene-derived probes for use in genetic mapping is described in Bernatzky and Tanksley (1986) Plant Mol. Biol. Reporter 4: 37-41. Numerous publications describe genetic mapping of specific cDNA clones using the methodology outlined above or variations thereof. For example, F2 intercross populations, backcross populations, randomly mated populations, near isogenic lines, and other sets of individuals may be used for mapping. Such methodologies are well known to those skilled in the art.

[0192] The nucleic acid probes may also be used for physical mapping (i.e., placement of sequences on physical maps; see Hoheisel et al. In: Non-mammalian Genomic Analysis: A Practical Guide, Academic press 1996, pp. 319-346, and references cited therein).

[0193] In another embodiment, the nucleic acid probes may be used in direct fluorescence in situ hybridisation (FISH) mapping (Trask (1991) Trends Genet. 7:149-154). Although current methods of FISH mapping favour use of large clones (several kb to several hundred kb; see Laan et al. (1995) Genome Res. 5:13-20), improvements in sensitivity may allow performance of FISH mapping using shorter probes.

[0194] A variety of nucleic acid amplification-based methods for genetic and physical mapping may be carried out using the nucleic acids. Examples include allele-specific amplification (Kazazian (1989) J. Lab. Clin. Med 11:95-96), polymorphism of PCR-amplified fragments (CAPS; Sheffield et al. (1993) Genomics 16:325-332), allele-specific ligation (Landegren et al. (1988) Science 241:1077-1080), nucleotide extension reactions (Sokolov (1990) Nucleic Acid Res. 18:3671), Radiation Hybrid Mapping (Walter et al. (1997) Nat. Genet. 7:22-28) and Happy Mapping (Dear and Cook (1989) Nucleic Acid Res. 17:6795-6807). For these methods, the sequence of a nucleic acid is used to design and produce primer pairs for use in the amplification reaction or in primer extension reactions. The design of such primers is well known to those skilled in the art. In methods employing PCR-based genetic mapping, it may be necessary to identify DNA sequence differences between the parents of the mapping cross in the region corresponding to the instant nucleic acid sequence. This, however, is generally not necessary for mapping methods.

[0195] Plant

[0196] The term “plant” as used herein encompasses whole plants, ancestors and progeny of the plants and plant parts, including seeds, shoots, stems, leaves, roots (including tubers), flowers, and tissues and organs, wherein each of the aforementioned comprise the gene/nucleic acid of interest. The term “plant” also encompasses plant cells, suspension cultures, callus tissue, embryos, meristematic regions, gametophytes, sporophytes, pollen and microspores, again wherein each of the aforementioned comprises the gene/nucleic acid of interest.

[0197] Plants that are particularly useful in the methods of the invention include all plants which belong to the superfamily Viridiplantae, in particular monocotyledonous and dicotyledonous plants including fodder or forage legumes, ornamental plants, food crops, trees or shrubs selected from the list comprising Acer spp., Actinidia spp., Abelmoschus spp., Agave sisalana, Agropyron spp., Agrostis stolonifera, Allium spp., Amaranthus spp., Ammophila arenaria, Ananas comosus, Annona spp., Apium graveolens, Arachis spp, Artocarpus spp., Asparagus officinalis, Avena spp. (e.g. Avena sativa, Avena fatua, Avena byzantina, Avena fatua var. sativa, Avena hybrida), Averrhoa carambola, Bambusa sp., Benincasa hispida, Bertholletia excelsea, Beta vulgaris, Brassica spp. (e.g. Brassica napus, Brassica rapa ssp. [canola, oilseed rape, turnip rape]), Cadaba farinosa, Camellia sinensis, Canna indica, Cannabis sativa, Capsicum spp., Carex elata, Carica papaya, Carissa macrocarpa, Carya spp., Carthamus tinctorius, Castanea spp., Ceiba pentandra, Cichorium endivia, Cinnamomum spp., Citrullus lanatus, Citrus spp., Cocos spp., Coffea spp., Colocasia esculenta, Cola spp., Corchorus sp., Coriandrum sativum, Corylus spp., Crataegus spp., Crocus sativus, Cucurbita spp., Cucumis spp., Cynara spp., Daucus carota, Desmodium spp., Dimocarpus longan, Dioscorea spp., Diospyros spp., Echinochloa spp., Elaeis (e.g. Elaeis guineensis, Elaeis oleifera), Eleusine coracana, Eragrostis tef, Erianthus sp., Eriobotrya japonica, Eucalyptus sp., Eugenia uniflora, Fagopyrum spp., Fagus spp., Festuca arundinacea, Ficus carica, Fortunella spp., Fragaria spp., Ginkgo biloba, Glycine spp. (e.g. Glycine max, Soja hispida or Soja max), Gossypium hirsutum, Helianthus spp. (e.g. Helianthus annuus), Hemerocallis fulva, Hibiscus spp., Hordeum spp. (e.g. Hordeum vulgare), Ipomoea batatas, Juglans spp., Lactuca sativa, Lathyrus spp., Lens culinaris, Linum usitatissimum, Litchi chinensis, Lotus spp., Luffa acutangula, Lupinus spp., Luzula sylvatica, Lycopersicon spp. (e.g. Lycopersicon esculentum, Lycopersicon lycopersicum, Lycopersicon pyriforme), Macrotyloma spp., Malus spp., Malpighia emarginata, Mammea americana, Mangifera indica, Manihot spp., Manilkara zapota, Medicago sativa, Melilotus spp., Mentha spp., Miscanthus sinensis, Momordica spp., Morus nigra, Musa spp., Nicotiana spp., Olea spp., Opuntia spp., Ornithopus spp., Oryza spp. (e.g. Oryza sativa, Oryza latifolia), Panicum miliaceum, Panicum virgatum, Passiflora edulis, Pastinaca sativa, Pennisetum sp., Persea spp., Petroselinum crispum, Phalaris arundinacea, Phaseolus spp., Phleum pratense, Phoenix spp., Phragmites australis, Physalis spp., Pinus spp., Pistacia vera, Pisum spp., Poa spp., Populus spp., Prosopis spp., Prunus spp., Psidium spp., Punica granatum, Pyrus communis, Quercus spp., Raphanus sativus, Rheum rhabarbarum, Ribes spp., Ricinus communis, Rubus spp., Saccharum spp., Salix sp., Sambucus spp., Secale cereale, Sesamum spp., Sinapis sp., Solanum spp. (e.g. Solanum tuberosum, Solanum integrifolium or Solanum lycopersicum), Sorghum bicolor, Spinacia spp., Syzygium spp., Tagetes spp., Tamarindus indica, Theobroma cacao, Trifolium spp., Tripsacum dactyloides, Triticosecale rimpaui, Triticum spp. (e.g. Triticum aestivum, Triticum durum, Triticum turgidum, Triticum hybernum, Triticum macha, Triticum sativum, Triticum monococcum or Triticum vulgare), Tropaeolum minus, Tropaeolum majus, Vaccinium spp., Vicia spp., Vigna spp., Viola odorata, Vitis spp., Zea mays, Zizania palustris, Ziziphus spp., amongst others.

[0198] Control Plant(s)

[0199] The choice of suitable control plants is a routine part of an experimental setup and may include corresponding wild type plants or corresponding plants without the gene of interest. The control plant is typically of the same plant species or even of the same variety as the plant to be assessed. The control plant may also be a nullizygote of the plant to be assessed. Nullizygotes (or null control plants) are individuals missing the transgene by segregation. Further, control plants are grown under equal growing conditions to the growing conditions of the plants of the invention, i.e. in the vicinity of, and simultaneously with, the plants of the invention. A “control plant” as used herein refers not only to whole plants, but also to plant parts, including seeds and seed parts.

### DETAILED DESCRIPTION OF THE INVENTION

[0200] Surprisingly, it has now been found that modulating expression in a plant of a nucleic acid encoding a WIL polypeptide or a SAWADEE-like polypeptide or a POZ-like polypeptide gives plants having enhanced yield-related traits relative to control plants.

[0201] According to a first embodiment, the present invention provides a method for enhancing yield-related traits in plants relative to control plants, comprising modulating expression in a plant of a nucleic acid encoding a WIL polypeptide or a SAWADEE-like polypeptide or a POZ-like polypeptide and optionally selecting for plants having enhanced yield-related traits. According to another embodiment, the present invention provides a method for producing plants having enhancing yield-related traits relative to control plants, wherein said method comprises the steps of modulating expression in said plant of a nucleic acid encoding a WIL polypeptide or a SAWADEE-like polypeptide or a POZ-like polypeptide as described herein and optionally selecting for plants having enhanced yield-related traits.

[0202] A preferred method for modulating, preferably increasing, expression of a nucleic acid encoding a WIL polypeptide or a SAWADEE-like polypeptide or a POZ-like polypeptide is by introducing and expressing in a plant a nucleic acid encoding a WIL polypeptide or a SAWADEE-like polypeptide or a POZ-like polypeptide.

[0203] Any reference hereinafter to a “protein useful in the methods of the invention” is taken to mean a WIL polypeptide or a SAWADEE-like polypeptide or a POZ-like polypeptide as defined herein. Any reference hereinafter to a “nucleic acid useful in the methods of the invention” is taken to mean a nucleic acid capable of encoding such a WIL polypeptide or a SAWADEE-like polypeptide or a POZ-like polypeptide. The nucleic acid to be introduced into a plant (and therefore useful in performing the methods of the invention) is any nucleic acid encoding the type of protein which will now be described, hereafter also named “WIL nucleic acid” or “WIL gene” or “SAWADEE-like nucleic acid” or “SAWADEE-like gene” or “POZ-like nucleic acid” or “POZ-like gene”.

[0204] A “WIL polypeptide” as defined herein refers to any polypeptide comprising one or more of the following MEME motifs:

(i) Motif 1:
(SEQ ID NO: 317)
IT[RQ][VL]REYFNTS[VL]TV[RT][DR][VLF]
(ii) Motif 2:
(SEQ ID NO: 318)
[PR][RS][AIV][YS]W[VI]H[AV]W[AT]V[ET][GD]G[RGI]
(iii) Motif 3:
(SEQ ID NO: 319)
[DS][DN][DR][DVA][DG][RK]S[VL]PGLVLA[IL].

[0205] In a more preferred embodiment, the WIL polypeptide comprises in increasing order of preference at least 2 or all of the motifs 1 to 3.

[0206] Motifs 1 to 3 were derived using the MEME algorithm (Bailey and Elkan, Proceedings of the Second International Conference on Intelligent Systems for Molecular Biology, pp. 28-36, AAAI Press, Menlo Park, Calif., 1994). At each position within a MEME motif, the residues are shown that are present in the query set of sequences with a frequency higher than 0.2. Residues within square brackets represent alternatives.

[0207] In an even more preferred embodiment, the WIL polypeptide comprises an Interpro accession IPR009798 WI12 domain, corresponding to PFAM accession number PF07107 WI12 domain.

[0208] The term “WIL” or “WIL polypeptide” as used herein also intends to include homologues as defined hereunder of “WIL polypeptide”.

[0209] Additionally or alternatively, the homologue of a WIL protein has in increasing order of preference at least 25%, 26%, 27%, 28%, 29%, 30%, 31%, 32%, 33%, 34%, 35%, 36%, 37%, 38%, 39%, 40%, 41%, 42%, 43%, 44%, 45%, 46%, 47%, 48%, 49%, 50%, 51%, 52%, 53%, 54%, 55%, 56%, 57%, 58%, 59%, 60%, 61%, 62%, 63%, 64%, 65%, 66%, 67%, 68%, 69%, 70%, 71%, 72%, 73%, 74%, 75%, 76%, 77%, 78%, 79%, 80%, 81%, 82%, 83%, 84%, 85%, 86%, 87%, 88%, 89%, 90%, 91%, 92%, 93%, 94%, 95%, 96%, 97%, 98%, or 99% overall sequence identity to the amino acid represented by SEQ ID NO: 2, provided that the homologous protein comprises any one or more of the conserved motifs as outlined above.

[0210] The overall sequence identity is determined using a global alignment algorithm, such as the Needleman Wunsch algorithm in the program GAP (GCG Wisconsin Package, Accelrys), preferably with default parameters and preferably with sequences of mature proteins (i.e. without taking into account secretion signals or transit peptides). Compared to overall sequence identity, the sequence identity will generally be higher when only conserved domains or motifs are considered.

[0211] Preferably the motifs in a WIL polypeptide have, in increasing order of preference, at least 70%, 71%, 72%, 73%, 74%, 75%, 76%, 77%, 78%, 79%, 80%, 81%, 82%, 83%, 84%, 85%, 86%, 87%, 88%, 89%, 90%, 91%, 92%, 93%, 94%, 95%, 96%, 97%, 98%, or 99% sequence identity to any one or more of the motifs represented by SEQ ID NO: 317 to SEQ ID NO: 319 (Motifs 1 to 3).

[0212] In another preferred embodiment a method is provided wherein said WIL polypeptide comprises a conserved domain with at least 70%, 71%, 72%, 73%, 74%, 75%, 76%, 77%, 78%, 79%, 80%, 81%, 82%, 83%, 84%, 85%, 86%, 87%, 88%, 89%, 90%, 91%, 92%, 93%, 94%, 95%, 96%, 97%, 98%, or 99% sequence identity to a conserved domain of amino acid coordinates 60 to 177 of SEQ ID NO:2.

[0213] The terms “domain”, “signature” and “motif” are defined in the “definitions” section herein.

[0214] In addition, WIL polypeptides, when expressed in transgenic plants such as e.g. rice according to the methods of the present invention as outlined in Examples 6 and 8, give plants having increased yield related traits, in particular in particular increased yield, more in particular increased seed yield, even more in particular increased fillrate, increased weight of seeds and increased harvest index, relative to control plants.

[0215] The present invention is illustrated by transforming plants with the nucleic acid sequence represented by SEQ ID NO: 1, encoding the polypeptide sequence of SEQ ID NO: 2. However, performance of the invention is not restricted to these sequences; the methods of the invention may advantageously be performed using any WIL-encoding nucleic acid or WIL polypeptide as defined herein.

[0216] Examples of nucleic acids encoding WIL polypeptides are given in Table A1 of the Examples section herein. Such nucleic acids are useful in performing the methods of the invention. The amino acid sequences given in Table A1 of the Examples section are example sequences of orthologues and paralogues of the WIL polypeptide represented by SEQ ID NO: 2, the terms “orthologues” and “paralogues” being as defined herein. Further orthologues and paralogues may readily be identified by performing a so-called reciprocal blast search as described in the definitions section; where the query sequence is SEQ ID NO: 1 or SEQ ID NO: 2, the second BLAST (back-BLAST) would be against rice sequences.

[0217] The invention also provides hitherto unknown WIL-encoding nucleic acids and WIL polypeptides useful for conferring enhanced yield-related traits in plants relative to control plants.

[0218] According to a further embodiment of the present invention, there is therefore provided an isolated nucleic acid molecule selected from:
[0219] (i) a nucleic acid represented by SEQ ID NO: 3;
[0220] (ii) the complement of a nucleic acid represented by SEQ ID NO: 3;
[0221] (iii) a nucleic acid encoding a WIL polypeptide having in increasing order of preference at least 50%, 51%, 52%, 53%, 54%, 55%, 56%, 57%, 58%, 59%, 60%, 61%, 62%, 63%, 64%, 65%, 66%, 67%, 68%, 69%, 70%, 71%, 72%, 73%, 74%, 75%, 76%, 77%, 78%, 79%, 80%, 81%, 82%, 83%, 84%, 85%, 86%, 87%, 88%, 89%, 90%, 91%, 92%, 93%, 94%, 95%, 96%, 97%, 98%, or 99% sequence identity to the amino acid sequence represented by SEQ ID NO: 4, and additionally or alternatively comprising one or more motifs having in increasing order of preference at least 50%, 55%, 60%, 65%, 70%, 75%, 80%, 85%, 90%, 95%, 96%, 97%, 98%, 99% or more sequence identity to any one or more of the motifs given in SEQ ID NO: 317 to SEQ ID NO: 319, and further preferably conferring enhanced yield-related traits relative to control plants.
[0222] (iv) a nucleic acid molecule which hybridizes with a nucleic acid molecule of (i) to (iii) under high stringency hybridization conditions and preferably confers enhanced yield-related traits relative to control plants.

[0223] According to a further embodiment of the present invention, there is also provided an isolated polypeptide selected from:
[0224] (i) an amino acid sequence represented by SEQ ID NO: 4;
[0225] (ii) an amino acid sequence having, in increasing order of preference, at least 50%, 51%, 52%, 53%, 54%, 55%, 56%, 57%, 58%, 59%, 60%, 61%, 62%, 63%, 64%, 65%, 66%, 67%, 68%, 69%, 70%, 71%, 72%, 73%, 74%, 75%, 76%, 77%, 78%, 79%, 80%, 81%, 82%, 83%, 84%, 85%, 86%, 87%, 88%, 89%, 90%, 91%, 92%, 93%, 94%, 95%, 96%, 97%, 98%, or 99% sequence identity to the amino acid sequence represented by SEQ ID NO: 4, and additionally or alternatively comprising one or more motifs having in increasing order of preference at least 50%, 55%, 60%, 65%, 70%, 75%, 80%, 85%, 90%, 95%, 96%, 97%, 98%, 99% or more sequence identity to any one or more of the motifs given in SEQ ID NO: 317 to SEQ ID NO: 319, and further preferably conferring enhanced yield-related traits relative to control plants;
[0226] (iii) derivatives of any of the amino acid sequences given in (i) or (ii) above.

[0227] A “SAWADEE-like polypeptide” as defined herein refers to any polypeptide comprising the following:
[0228] 1. A homeodomain; and
[0229] 2. A SAWADEE domain; and
[0230] 3. A nuclear localisation signal (NLS).

[0231] Domain I: Homeodomain (SEQ ID NO: 438)

[0232] NGGPSFRFMQYEVTEMDAILQEHHNMMPAREVLVSLAEKFSESSERKGKIQVQMKQVWN WFQNRRYAIRAKS, or a domain having in increasing order of preference at least 60%, 61%, 62%, 63%, 64%, 65%, 66%, 67%, 68%, 69%, 70%, 71%, 72%, 73%, 74%, 75%, 76%, 77%, 78%, 79%, 80%, 81%, 82%, 83%, 84%, 85%, 86%, 87%, 88%, 89%, 90%, 91%, 92%, 93%, 94%, 95%, 96%, 97%, 98%, or 99% sequence identity to Domain I.

[0233] The homeodomain binds DNA through a helix-turn-helix (HTH) structure. The HTH motif is characterised by two alpha-helices, which make intimate contacts with the DNA and are joined by a short turn. The second helix binds to DNA via a number of hydrogen bonds and hydrophobic interactions, which occur between specific side chains and the exposed bases and thymine methyl groups within the major groove of the DNA. The first helix helps to stabilise the structure.

[0234] The homeodomain further falls under Inter Pro accession number IPRO01356.

[0235] Domain II: SAWADEE Domain

[0236] The SAWADEE domain is made up of each of Motifs 4, 5 and 6 as described below and comprises the conserved cysteine and histidine residues indicated below or as indicated in the alignment of FIG. 3.

[0237] Motif 4 (SEQ ID NO: 439)

[0238] [PV]GDL[IV]LCFQEGK[ED]QALY[FY]DAHVL[DE][IA]QR[RK][RL]HD[VI]RGCRC[RI]F[LV]V RYDHDQSEE, or a motif having in increasing order of preference at least 60%, 61%, 62%, 63%, 64%, 65%, 66%, 67%, 68%, 69%, 70%, 71%, 72%, 73%, 74%, 75%, 76%, 77%, 78%, 79%, 80%, 81%, 82%, 83%, 84%, 85%, 86%, 87%, 88%, 89%, 90%, 91%, 92%, 93%, 94%, 95%, 96%, 97%, 98%, or 99% sequence identity to the Motif 4; and

[0239] Motif 5 (SEQ ID NO: 440)

[0240] EV[RL]VRF[AS]GFG[AP]EEDEW[VI]NV[RK][KR], or a motif having in increasing order of preference at least 60%, 61%, 62%, 63%, 64%, 65%, 66%, 67%, 68%, 69%, 70%, 71%, 72%, 73%, 74%, 75%, 76%, 77%, 78%, 79%, 80%, 81%, 82%, 83%, 84%, 85%, 86%, 87%, 88%, 89%, 90%, 91%, 92%, 93%, 94%, 95%, 96%, 97%, 98%, or 99% sequence identity to the Motif 5; and

[0241] Motif 6 (SEQ ID NO: 441)

[0242] [RK]DGAWYDVA[AST]FL[ST][HY]R, or a motif having in increasing order of preference at least 60%, 61%, 62%, 63%, 64%, 65%, 66%, 67%, 68%, 69%, 70%, 71%, 72%, 73%, 74%, 75%, 76%, 77%, 78%, 79%, 80%, 81%, 82%, 83%, 84%, 85%, 86%, 87%, 88%, 89%, 90%, 91%, 92%, 93%, 94%, 95%, 96%, 97%, 98%, or 99% sequence identity to the Motif 6.

[0243] Preferably, the SAWADEE domain is represented by the following sequence or by a sequence having in increasing order of preference at least 60%, 61%, 62%, 63%, 64%, 65%, 66%, 67%, 68%, 69%, 70%, 71%, 72%, 73%, 74%, 75%, 76%, 77%, 78%, 79%, 80%, 81%, 82%, 83%, 84%, 85%, 86%, 87%, 88%, 89%, 90%, 91%, 92%, 93%, 94%, 95%, 96%, 97%, 98%, or 99% identity thereto: FEAKSGRDGAWYDVGTFQSHRYLDKGDPEVLVRFA GFGPDEDEWLNVCKHVRQRSLPCEASECVAVLPGDLILCFQEGKDQALYFDAHVLDAQR RRHDVRGCRCRFLVRYDHDQSEEIVPLRKICRRPETDY (SEQ ID NO: 442)

[0244] NLS

[0245] A nuclear localisation signal or NLS typically consists of one or more short sequences of positively charged lysines or arginines which serve to target the protein to the nucleus. The NLS may be as shown in the alignment of FIG. 3.

[0246] The term “SAWADEE-like” or “SAWADEE-like polypeptide” as used herein also therefore includes homologues of a “SAWADEE-like polypeptide”.

[0247] Motifs 4, 5 and 6 above are so-called MEME motifs and represent the sequence that is present in 80% of the query set of proteins. At each position within a MEME motif, the residues are shown that are present in the query set of sequences with a frequency higher than 0.2. Residues within square brackets represent alternatives. For the MEME algorithm see Bailey and Elkan (Proceedings of the Second International Conference on Intelligent Systems for Molecular Biology, pp. 28-36, AAAI Press, Menlo Park, Calif., 1994.)

[0248] Additionally or alternatively, the SAWADEE-like polypeptide has in increasing order of preference at least 25%, 26%, 27%, 28%, 29%, 30%, 31%, 32%, 33%, 34%, 35%, 36%, 37%, 38%, 39%, 40%, 41%, 42%, 43%, 44%, 45%, 46%, 47%, 48%, 49%, 50%, 51%, 52%, 53%, 54%, 55%, 56%, 57%, 58%, 59%, 60%, 61%, 62%, 63%, 64%, 65%, 66%, 67%, 68%, 69%, 70%, 71%, 72%, 73%, 74%, 75%, 76%, 77%, 78%, 79%, 80%, 81%, 82%, 83%, 84%, 85%, 86%, 87%, 88%, 89%, 90%, 91%, 92%, 93%, 94%, 95%, 96%, 97%, 98%, or 99% overall sequence identity to the amino acid represented by SEQ ID NO: 325, and comprises (i) a homeodomain, (ii) a SAWADEE domain and (iii) an NLS, each as defined herein.

[0249] Overall sequence identity is determined using a global alignment algorithm, such as the Needleman Wunsch algorithm in the program GAP (GCG Wisconsin Package, Accelrys), preferably with default parameters and preferably with sequences of mature proteins (i.e. without taking into account secretion signals or transit peptides). Compared to overall sequence identity, the sequence identity will generally be higher when only conserved domains or motifs are considered.

[0250] The terms “domain”, “signature” and “motif” are defined in the “definitions” section herein.

[0251] Furthermore, the SAWADEE-like polypeptide sequence when used in the construction of a phylogenetic tree, such as the one depicted in FIG. 4, clusters with the group of SAWADEE-like polypeptides rather than any other homeobox proteins.

[0252] In addition, SAWADEE-like polypeptides, when expressed in transgenic plants such as rice according to the methods of the present invention, and as further detailed in the Examples section herein, give plants having increased yield-related traits, such as increased seed yield, increased thousand kernel weight, increased harvest index, increased number of filled seeds etc.

[0253] The present invention is illustrated by transforming plants with the nucleic acid sequence represented by SEQ ID NO: 324, encoding the polypeptide sequence of SEQ ID NO: 325. However, performance of the invention is not restricted to these sequences; the methods of the invention may advantageously be performed using any SAWADEE-like encoding nucleic acid or SAWADEE-like polypeptide as defined herein.

[0254] Examples of nucleic acids encoding SAWADEE-like polypeptides are given in Table A2 of the Examples section herein. Such nucleic acids are useful in performing the methods of the invention. The amino acid sequences given in Table A2 of the Examples section are example sequences of orthologues and paralogues of the SAWADEE-like polypeptide represented by SEQ ID NO: 325, the terms “orthologues” and “paralogues” being as defined herein. Further orthologues and paralogues may readily be identified by performing a so-called reciprocal blast search as described in the definitions section; where the query sequence is SEQ ID NO: 324 or SEQ ID NO: 325, the second BLAST (back-BLAST) would be against poplar sequences.

[0255] A “POZ-like polypeptide” as defined herein refers to any polypeptide comprising a BTB/POZ domain (PFam PF00651), but not comprising a MATH domain (Pfam PF00917) or a zf-TAZ domain (PFam PF02135), as described in Figueroa et al. (Plant Cell 17: 1180-1195, 2005). Preferably the POZ-like protein comprises one or more of the following motifs 7 to 9:

Motif 7
(SEQ ID NO: 543)
AH[RK]A[VI]L[AS]A[RTS]SPVF[REH]SMF[SL]H[DN]L[KR]EKE[SL]S[IT][IV][NDH]I[SE]DMS
[TL]E[SA]C[QTM]A[LF]L[SN]Y[LI]YG[NT]I
Motif 2
(SEQ ID NO: 544)
[DE][LF][WL]KHRLALL[GR]AA[DN]KYDI[VG]DLK[END]AC[EH]ESLLEDI[DN][ST][KG]NVLE
RLQEAWLYQL
Motif 9
(SEQ ID NO: 545)
[KR]VET[ILT]SRLAQWRI[DE]N[LF][GT][PAS][SC][TS]Y[RK][KR]SDPFK[IV]G[IL]WNW[HY]
LS[VI]E[KR]N

[0256] Motifs 7 to 9 are representative for POZ-like proteins from Classes 1, 2 and 3 as shown in FIG. 9. More preferably the POZ-like protein comprises one or more of the following motifs 10 to 12:

Motif 10
(SEQ ID NO: 546)
AH[RK]A[VI]L[AS]A[RTS]SPVF[RH]SMF[SL]H[DN]L[KR]EKE[LS]ST[IV][ND]I[SE]DMS[LTI]
[ED][AS]C[QT]A[LF]L[SN]Y[IL]YG[NT]I
Motif 11
(SEQ ID NO: 547)
[DE][LF][LW]KHRLALL[GR]AA[DN]KYDI[VG]DLK[END]AC[EH]ESLLEDI[DN][ST][KG]NVLE
RLQ[EN]AWLY[QR]L
Motif 12
(SEQ ID NO: 548)
[RK]VET[ILT][SAP]RLAQW[RK][IV][DE]N[LF][GTA][SAP][SC][TS]Y[RK][KR]SDPF[KR][IV]G
[IL]WNW[HY]LS[VI]E[KR]N

[0257] Motifs 10 to 12 are representative for POZ-like proteins from Classes 2 and 3 as shown in FIG. 9. Most preferably the POZ-like protein comprises one or more of the following motifs 13 to 15:

Motif 13
(SEQ ID NO: 549)
ET[LI][SA]RLAQW[RK]I[DE][NS][FL][TG][AP][SC][ST]Y[KR][RK]SDPFK[LVI]GIWNW[HY]LS
[IV]E[KR]NRYLY[IV][RH]LFPEP
Motif 14
(SEQ ID NO: 550)
K[ND][AL]CEESLLEDINSGNVLERL[QN]EAWLYQLx[KR]LKKGCL[MT]YLFDFGKIYDVR
Motif 15
(SEQ ID NO: 551)
SPVF[HE]SMFLH[DN]L[RK]EKESS[TI]I[ND]IEDMS[LTV]ESC[TM]ALLSY[LI]YGTIKQED[LF]
WKHR

[0258] Motifs 13 to 15 are representative for POZ-like proteins from Class 3 as shown in FIG. 9.

[0259] The term “POZ-like” or “POZ-like polypeptide” as used herein also intends to include homologues as defined hereunder of “POZ-like polypeptide”.

[0260] Motifs 7 to 15 were derived using the MEME algorithm (Bailey and Elkan, Proceedings of the Second International Conference on Intelligent Systems for Molecular Biology, pp. 28-36, AAAI Press, Menlo Park, Calif., 1994). At each position within a MEME motif, the residues are shown that are present in the query set of sequences with a frequency higher than 0.2. Residues within square brackets represent alternatives.

[0261] More preferably, the POZ-like polypeptide comprises in increasing order of preference, at least 2, at least 3, at least 4, at least 5, at least 6 of the above-mentioned motifs.

[0262] Additionally or alternatively, the homologue of a POZ-like protein has in increasing order of preference at least 25%, 26%, 27%, 28%, 29%, 30%, 31%, 32%, 33%, 34%, 35%, 36%, 37%, 38%, 39%, 40%, 41%, 42%, 43%, 44%, 45%, 46%, 47%, 48%, 49%, 50%, 51%, 52%, 53%, 54%, 55%, 56%, 57%, 58%, 59%, 60%, 61%, 62%, 63%, 64%, 65%, 66%, 67%, 68%, 69%, 70%, 71%, 72%, 73%, 74%, 75%, 76%, 77%, 78%, 79%, 80%, 81%, 82%, 83%, 84%, 85%, 86%, 87%, 88%, 89%, 90%, 91%, 92%, 93%, 94%, 95%, 96%, 97%, 98%, or 99% overall sequence identity to the amino acid represented by SEQ ID NO: 448, provided that the homologous protein comprises any one or more of the conserved motifs as outlined above. The overall sequence identity is determined using a global alignment algorithm, such as the Needleman Wunsch algorithm in the program GAP (GCG Wisconsin Package, Accelrys), preferably with default parameters and preferably with sequences of mature proteins (i.e. without taking into account secretion signals or transit peptides). Compared to overall sequence identity, the sequence identity will generally be higher when only conserved domains or motifs are considered. Preferably the motifs in a POZ-like polypeptide have, in increasing order of preference, at least 70%, 71%, 72%, 73%, 74%, 75%, 76%, 77%, 78%, 79%, 80%, 81%, 82%, 83%, 84%, 85%, 86%, 87%, 88%, 89%, 90%, 91%, 92%, 93%, 94%, 95%, 96%, 97%, 98%, or 99% sequence identity to any one or more of the motifs represented by SEQ ID NO: 543 to SEQ ID NO: 551 (Motifs 7 to 15).

[0263] In other words, in another embodiment a method is provided wherein said POZ-like polypeptide comprises a conserved domain (or motif) with at least 70%, 71%, 72%, 73%, 74%, 75%, 76%, 77%, 78%, 79%, 80%, 81%, 82%, 83%, 84%, 85%, 86%, 87%, 88%, 89%, 90%, 91%, 92%, 93%, 94%, 95%, 96%, 97%, 98%, or 99% sequence identity to the conserved domain starting with amino acid 155 up to amino acid 259 in SEQ ID NO: 448.

[0264] The terms “domain”, “signature” and “motif” are defined in the “definitions” section herein.

[0265] Preferably, the polypeptide sequence which when used in the construction of a phylogenetic tree, such as the one depicted in FIG. 9, clusters within the group of POZ-like polypeptides comprising the amino acid sequence represented by SEQ ID NO: 448 rather than with any other group, preferably it clusters within Class 2 or Class 3 as shown in FIG. 9, most preferably it clusters within Class 3 of POZ-like polypeptides.

[0266] Furthermore, POZ-like polypeptides (at least in their native form) typically interact with other proteins, in particular with CUL3 proteins. Tools and techniques for measuring protein-protein, such as yeast two hybrid assays are well known in the art. Further details are provided in Example 7.

[0267] In addition, POZ-like polypeptides, when expressed in rice according to the methods of the present invention as outlined in Examples 6 and 8, give plants having increased yield related traits, in particular increased biomass and/or increased number of seeds.

[0268] The present invention is illustrated by transforming plants with the nucleic acid sequence represented by SEQ ID NO: 447, encoding the polypeptide sequence of SEQ ID NO: 448. However, performance of the invention is not restricted to these sequences; the methods of the invention may advantageously be performed using any POZ-like-encoding nucleic acid or POZ-like polypeptide as defined herein.

[0269] Examples of nucleic acids encoding POZ-like polypeptides are given in Table A3 of the Examples section herein. Such nucleic acids are useful in performing the methods of the invention. The amino acid sequences given in Table A3 of the Examples section are example sequences of orthologues and paralogues of the POZ-like polypeptide represented by SEQ ID NO: 448, the terms “orthologues” and “paralogues” being as defined herein. Further orthologues and paralogues may readily be identified by performing a so-called reciprocal blast search as described in the definitions section; where the query sequence is SEQ ID NO: 447 or SEQ ID NO: 448, the second BLAST (back-BLAST) would be against tomato (Lycopersicon esculentum) sequences.

[0270] The invention also provides hitherto unknown POZ-like-encoding nucleic acids and POZ-like polypeptides useful for conferring enhanced yield-related traits in plants relative to control plants.

[0271] According to a further embodiment of the present invention, there is therefore provided an isolated nucleic acid molecule selected from:
[0272] (i) a nucleic acid represented by any of SEQ ID NO: 457, SEQ ID NO: 523, SEQ ID NO: 529, and SEQ ID NO: 535;
[0273] (ii) the complement of a nucleic acid represented by SEQ ID NO: 457, SEQ ID NO: 523, SEQ ID NO: 529, and SEQ ID NO: 535;
[0274] (iii) a nucleic acid encoding a POZ-like polypeptide having in increasing order of preference at least 50%, 51%, 52%, 53%, 54%, 55%, 56%, 57%, 58%, 59%, 60%, 61%, 62%, 63%, 64%, 65%, 66%, 67%, 68%, 69%, 70%, 71%, 72%, 73%, 74%, 75%, 76%, 77%, 78%, 79%, 80%, 81%, 82%, 83%, 84%, 85%, 86%, 87%, 88%, 89%, 90%, 91%, 92%, 93%, 94%, 95%, 96%, 97%, 98%, or 99% sequence identity to any of the amino acid sequences represented by SEQ ID NO: 458, SEQ ID NO: 524, SEQ ID NO: 530, and SEQ ID NO: 536, and additionally or alternatively comprising one or more motifs having in increasing order of preference at least 50%, 55%, 60%, 65%, 70%, 75%, 80%, 85%, 90%, 95%, 96%, 97%, 98%, 99% or more sequence identity to any one or more of the motifs given in SEQ ID NO: 543 to SEQ ID NO: 551, and further preferably conferring enhanced yield-related traits relative to control plants.
[0275] (iv) a nucleic acid molecule which hybridizes with a nucleic acid molecule of (i) to (iii) under high stringency hybridization conditions and preferably confers enhanced yield-related traits relative to control plants.

[0276] According to a further embodiment of the present invention, there is also provided an isolated polypeptide selected from:
[0277] (i) an amino acid sequence represented by any of SEQ ID NO: 458, SEQ ID NO: 524, SEQ ID NO: 530, and SEQ ID NO: 536;
[0278] (ii) an amino acid sequence having, in increasing order of preference, at least 50%, 51%, 52%, 53%, 54%, 55%, 56%, 57%, 58%, 59%, 60%, 61%, 62%, 63%, 64%, 65%, 66%, 67%, 68%, 69%, 70%, 71%, 72%, 73%, 74%, 75%, 76%, 77%, 78%, 79%, 80%, 81%, 82%, 83%, 84%, 85%, 86%, 87%, 88%, 89%, 90%, 91%, 92%, 93%, 94%, 95%, 96%, 97%, 98%, or 99% sequence identity to any of the amino acid sequences represented by SEQ ID NO: 458, SEQ ID NO: 524, SEQ ID NO: 530, and SEQ ID NO: 536, and additionally or alternatively comprising one or more motifs having in increasing order of preference at least 50%, 55%, 60%, 65%, 70%, 75%, 80%, 85%, 90%, 95%, 96%, 97%, 98%, 99% or more sequence identity to any one or more of the motifs given in SEQ ID NO: 543 to SEQ ID NO: 551, and further preferably conferring enhanced yield-related traits relative to control plants;
[0279] (iii) derivatives of any of the amino acid sequences given in (i) or (ii) above.

[0280] Nucleic acid variants may also be useful in practising the methods of the invention. Examples of such variants include nucleic acids encoding homologues and derivatives of any one of the amino acid sequences given in Tables A of the Examples section, the terms “homologue” and “derivative” being as defined herein. Also useful in the methods of the invention are nucleic acids encoding homologues and derivatives of orthologues or paralogues of any one of the amino acid sequences given in Tables A of the Examples section. Homologues and derivatives useful in the methods of the present invention have substantially the same biological and functional activity as the unmodified protein from which they are derived. Further variants useful in practising the methods of the invention are variants in which codon usage is optimised or in which miRNA target sites are removed.

[0281] Further nucleic acid variants useful in practising the methods of the invention include portions of nucleic acids encoding WIL polypeptides or SAWADEE-like polypeptides or POZ-like polypeptides, nucleic acids hybridising to nucleic acids encoding WIL polypeptides or SAWADEE-like polypeptides or POZ-like polypeptides, splice variants of nucleic acids encoding WIL polypeptides or SAWADEE-like polypeptides or POZ-like polypeptides, allelic variants of nucleic acids encoding WIL polypeptides and variants of nucleic acids encoding WIL polypeptides or SAWADEE-like polypeptides or POZ-like polypeptides obtained by gene shuffling. The terms hybridising sequence, splice variant, allelic variant and gene shuffling are as described herein.

[0282] Nucleic acids encoding WIL polypeptides or SAWADEE-like polypeptides or POZ-like polypeptides need not be full-length nucleic acids, since performance of the methods of the invention does not rely on the use of full-length nucleic acid sequences. According to the present invention, there is provided a method for enhancing yield-related traits in plants, comprising introducing and expressing in a plant a portion of any one of the nucleic acid sequences given in Tables A of the Examples section, or a portion of a nucleic acid encoding an orthologue, paralogue or homologue of any of the amino acid sequences given in Tables A of the Examples section.

[0283] A portion of a nucleic acid may be prepared, for example, by making one or more deletions to the nucleic acid. The portions may be used in isolated form or they may be fused to other coding (or non-coding) sequences in order to, for example, produce a protein that combines several activities. When fused to other coding sequences, the resultant polypeptide produced upon translation may be bigger than that predicted for the protein portion.

[0284] Portions useful in the methods of the invention, encode a WIL polypeptide or a SAWADEE-like polypeptide or POZ-like polypeptides as defined herein, and have substantially the same biological activity as the amino acid sequences given in Tables A of the Examples section. Preferably, the portion is a portion of any one of the nucleic acids given in Tables A of the Examples section, or is a portion of a nucleic acid encoding an orthologue or paralogue of any one of the amino acid sequences given in Tables A of the Examples section. Preferably the portion is at least for a WIL polypeptide: 200, 250, 300, 350, 400, 450, 500, 550, 600, 650, 700, 750, 800, 850, 900, 950, 1000, 1050, 1100, 1150, 1200, 1250, 1300, 1350, 1400, 1450, 1500, 1550, 1600 or for a SAWADEE-like polypeptide: 500, 550, 600, 650, 700, 750, 800, 850, 900, 950, 1000, 1050, 1100, 1150, 1200 or for a POZ-like polypeptide: 500, 550, 600, 650, 700, 750, 800, 850, 900, 950, 1000 consecutive nucleotides in length, the consecutive nucleotides being of any one of the nucleic acid sequences given in Tables A of the Examples section, or of a nucleic acid encoding an orthologue or paralogue of any one of the amino acid sequences given in Tables A of the Examples section. Most preferably the portion is a portion of the nucleic acid of SEQ ID NO: 1 or SEQ ID NO: 324 or SEQ ID NO: 447.

[0285] Preferably, the portion encodes a fragment of an amino acid sequence which, when used in the construction of a phylogenetic tree, clusters with the group of WIL polypeptides comprising the amino acid sequence represented by SEQ ID NO: 2 rather than with any other group.

[0286] Preferably, the portion encodes a fragment of an amino acid sequence which, when used in the construction of a phylogenetic tree, such as the one depicted in FIG. 9, clusters within the group of POZ-like polypeptides preferably clusters within Class 2 or Class 3 as shown in FIG. 9, most preferably clusters within Class 3 of POZ-like polypeptides comprising the amino acid sequence represented by SEQ ID NO: 448, and/or comprises motifs one or more of motifs 7 to 15, and/or has at least 58%, preferably at least 63% sequence identity to SEQ ID NO: 448.

[0287] Another nucleic acid variant useful in the methods of the invention is a nucleic acid capable of hybridising, under reduced stringency conditions, preferably under stringent conditions, with a nucleic acid encoding a WIL polypeptide or a SAWADEE-like polypeptide or a POZ-like polypeptide as defined herein, or with a portion as defined herein.

[0288] According to the present invention, there is provided a method for enhancing yield-related traits in plants, comprising introducing and expressing in a plant a nucleic acid capable of hybridizing to any one of the nucleic acids given in Tables A of the Examples section, or comprising introducing and expressing in a plant a nucleic acid capable of hybridising to a nucleic acid encoding an orthologue, paralogue or homologue of any of the nucleic acid sequences given in Tables A of the Examples section.

[0289] Hybridising sequences useful in the methods of the invention encode a WIL polypeptide or a SAWADEE-like polypeptide or a POZ-like polypeptide as defined herein, having substantially the same biological activity as the amino acid sequences given in Tables A of the Examples section. Preferably, the hybridising sequence is capable of hybridising to the complement of any one of the nucleic acids given in Tables A of the Examples section, or to a portion of any of these sequences, a portion being as defined above, or the hybridising sequence is capable of hybridising to the complement of a nucleic acid encoding an orthologue or paralogue of any one of the amino acid sequences given in Tables A of the Examples section. Most preferably, the hybridising sequence is capable of hybridising to the complement of a nucleic acid as represented by SEQ ID NO: 1 or SEQ ID NO: 324 or SEQ ID NO: 447 or to a portion of any thereof.

[0290] Preferably, the hybridising sequence encodes a polypeptide with an amino acid sequence which, when full-length and used in the construction of a phylogenetic tree, clusters with the group of WIL polypeptides comprising the amino acid sequence represented by SEQ ID NO: 2 rather than with any other group.

[0291] Preferably, the hybridising sequence encodes a polypeptide having an amino acid sequence which, when full-length and used in the construction of a phylogenetic tree, such as the one depicted in FIG. 4, clusters with the group of SAWADEE-like polypeptides rather than with other homeobox proteins.

[0292] Preferably, the hybridising sequence encodes a polypeptide with an amino acid sequence which, when full-length and when used in the construction of a phylogenetic tree, such as the one depicted in FIG. 9, clusters within the group of POZ-like polypeptides preferably clusters within Class 2 or Class 3 as shown in FIG. 9, most preferably clusters within Class 3 of POZ-like polypeptides comprising the amino acid sequence represented by SEQ ID NO: 448, and/or comprises motifs one or more of motifs 7 to 15, and/or has at least 58%, preferably at least 63% sequence identity to SEQ ID NO: 448.

[0293] Another nucleic acid variant useful in the methods of the invention is a splice variant encoding a WIL polypeptide or a SAWADEE-like polypeptide or a POZ-like polypeptide as defined hereinabove, a splice variant being as defined herein.

[0294] According to the present invention, there is provided a method for enhancing yield-related traits in plants, comprising introducing and expressing in a plant a splice variant of any one of the nucleic acid sequences given in Table A of the Examples section, or a splice variant of a nucleic acid encoding an orthologue, paralogue or homologue of any of the amino acid sequences given in Table A of the Examples section.

[0295] Preferred splice variants are splice variants of a nucleic acid represented by SEQ ID NO: 1 or SEQ ID NO: 324 or SEQ ID NO: 447, or a splice variant of a nucleic acid encoding an orthologue or paralogue of SEQ ID NO: 2 or SEQ ID NO: 325 or SEQ ID NO: 448.

[0296] Preferably, the amino acid sequence encoded by the splice variant, when used in the construction of a phylogenetic tree, clusters with the group of WIL polypeptides comprising the amino acid sequence represented by SEQ ID NO: 2 rather than with any other.

[0297] Preferably, the amino acid sequence encoded by the splice variant, when used in the construction of a phylogenetic tree, such as the one depicted in FIG. 4, clusters with the group of SAWADEE-like polypeptides rather than with other homeobox protein.

[0298] Preferably, the amino acid sequence encoded by the splice variant, when used in the construction of a phylogenetic tree, such as the one depicted in FIG. 9, clusters within the group of POZ-like polypeptides preferably clusters within Class 2 or Class 3 as shown in FIG. 9, most preferably clusters within Class 3 of POZ-like polypeptides comprising the amino acid sequence represented by SEQ ID NO: 448, and/or comprises motifs one or more of motifs 7 to 15, and/or has at least 58%, preferably at least 63% sequence identity to SEQ ID NO: 448.

[0299] Another nucleic acid variant useful in performing the methods of the invention is an allelic variant of a nucleic acid encoding a WIL polypeptide or a SAWADEE-like polypeptide or a POZ-like polypeptide as defined hereinabove, an allelic variant being as defined herein.

[0300] According to the present invention, there is provided a method for enhancing yield-related traits in plants, comprising introducing and expressing in a plant an allelic variant of any one of the nucleic acids given in Table A of the Examples section, or comprising introducing and expressing in a plant an allelic variant of a nucleic acid encoding an orthologue, paralogue or homologue of any of the amino acid sequences given in Tables A of the Examples section.

[0301] The polypeptides encoded by allelic variants useful in the methods of the present invention have substantially the same biological activity as the WIL polypeptide of SEQ ID NO: 2 or or as the SAWADEE-like polypeptide of SEQ ID NO: 325 or as the POZ-like polypeptide of SEQ ID NO: 448 and any of the amino acids depicted in Tables A of the Examples section. Allelic variants exist in nature, and encompassed within the methods of the present invention is the use of these natural alleles. Preferably, the allelic variant is an allelic variant of SEQ ID NO: 1 or SEQ ID NO: 324 or SEQ ID NO: 447 or an allelic variant of a nucleic acid encoding an orthologue or paralogue of SEQ ID NO: 2 or SEQ ID NO: 325 or SEQ ID NO: 448.

[0302] Preferably, the amino acid sequence encoded by the allelic variant, when used in the construction of a phylogenetic tree, clusters with the WIL polypeptides comprising the amino acid sequence represented by SEQ ID NO: 2 rather than with any other group.

[0303] Preferably, the amino acid sequence encoded by the allelic variant, when used in the construction of a phylogenetic tree, such as the one depicted in FIG. 4, clusters with the SAWADEE-like polypeptides rather than with other homeobox proteins.

[0304] Preferably, the amino acid sequence encoded by the allelic variant, when used in the construction of a phylogenetic tree, such as the one depicted in FIG. 9, clusters within the group of POZ-like polypeptides preferably clusters within Class 2 or Class 3 as shown in FIG. 9, most preferably clusters within Class 3 of POZ-like polypeptides comprising the amino acid sequence represented by SEQ ID NO: 448, and/or comprises motifs one or more of motifs 7 to 15, and/or has at least 58%, preferably at least 63% sequence identity to SEQ ID NO: 448.

[0305] Gene shuffling or directed evolution may also be used to generate variants of nucleic acids encoding WIL polypeptides or SAWADEE-like polypeptides or POZ-like polypeptides as defined above; the term “gene shuffling” being as defined herein.

[0306] According to the present invention, there is provided a method for enhancing yield-related traits in plants, comprising introducing and expressing in a plant a variant of any one of the nucleic acid sequences given in Table A of the Examples section, or comprising introducing and expressing in a plant a variant of a nucleic acid encoding an orthologue, paralogue or homologue of any of the amino acid sequences given in Table A of the Examples section, which variant nucleic acid is obtained by gene shuffling.

[0307] Preferably, the amino acid sequence encoded by the variant nucleic acid obtained by gene shuffling, when used in the construction of a phylogenetic tree, clusters with the group of WIL polypeptides comprising the amino acid sequence represented by SEQ ID NO: 2 rather than with any other group.

[0308] Preferably, the amino acid sequence encoded by the variant nucleic acid obtained by gene shuffling, when used in the construction of a phylogenetic tree such as the one depicted in FIG. 4, clusters with the group of SAWADEE-like polypeptides rather than with other homeobox proteins.

[0309] Preferably, the amino acid sequence encoded by the variant nucleic acid obtained by gene shuffling, when used in the construction of a phylogenetic tree, such as the one depicted in FIG. 9, clusters within the group of POZ-like polypeptides preferably clusters within Class 2 or Class 3 as shown in FIG. 9, most preferably clusters within Class 3 of POZ-like polypeptides comprising the amino acid sequence represented by SEQ ID NO: 448, and/or comprises motifs one or more of motifs 7 to 15, and/or has at least 58%, preferably at least 63% sequence identity to SEQ ID NO: 448.

[0310] Furthermore, nucleic acid variants may also be obtained by site-directed mutagenesis. Several methods are available to achieve site-directed mutagenesis, the most common being PCR based methods (Current Protocols in Molecular Biology. Wiley Eds.).

[0311] Nucleic acids encoding WIL polypeptides or SAWADEE-like polypeptides or POZ-like polypeptides may be derived from any natural or artificial source. The nucleic acid may be modified from its native form in composition and/or genomic environment through deliberate human manipulation.

[0312] Preferably the WIL polypeptide-encoding nucleic acid is from a plant, further preferably from a monocotyledonous plant, more preferably from the family Poaceae, most preferably the nucleic acid is from Oryza sativa.

[0313] Preferably the SAWADEE-like polypeptide-encoding nucleic acid is from a plant, further preferably from a dicotyledonous plant, more preferably from the family brassicaceae or from the populus genus, most preferably the nucleic acid is from Populus trichocarpa.

[0314] Preferably the POZ-like polypeptide-encoding nucleic acid is from a plant, further preferably from a dicotyledonous plant, more preferably from the family Solanaceae, most preferably the nucleic acid is from Lycopersicon esculentum.

[0315] Performance of the methods of the invention gives plants having enhanced yield-related traits. In particular performance of the methods of the invention gives plants having increased yield, especially increased seed yield or increased biomass relative to control plants. The terms “yield” and “seed yield” are described in more detail in the “definitions” section herein.

[0316] Reference herein to enhanced yield-related traits is taken to mean an increase early vigour and/or in biomass (weight) of one or more parts of a plant, which may include aboveground (harvestable) parts and/or (harvestable) parts below ground. In particular, such harvestable parts are seeds and/or biomass, and performance of the methods of the invention results in plants having increased seed yield relative to the seed yield of control plants.

[0317] The present invention provides a method for increasing yield, especially seed yield of plants or biomass, relative to control plants, which method comprises modulating expression in a plant of a nucleic acid encoding a WIL polypeptide or a SAWADEE-like polypeptide or a POZ-like polypeptide as defined herein.

[0318] According to a preferred feature of the present invention, performance of the methods of the invention gives plants having an increased growth rate relative to control plants. Therefore, according to the present invention, there is provided a method for increasing the growth rate of plants, which method comprises modulating expression in a plant of a nucleic acid encoding a WIL polypeptide or a SAWADEE-like polypeptide or a POZ-like polypeptide as defined herein.

[0319] Performance of the methods of the invention gives plants grown under non-stress conditions or under mild drought conditions increased yield relative to control plants grown under comparable conditions. Therefore, according to the present invention, there is provided a method for increasing yield in plants grown under non-stress conditions or under mild drought conditions, which method comprises modulating expression in a plant of a nucleic acid encoding a WIL polypeptide or a SAWADEE-like polypeptide or a POZ-like polypeptide.

[0320] Performance of the methods of the invention gives plants grown under conditions of nutrient deficiency, particularly under conditions of nitrogen deficiency, increased yield relative to control plants grown under comparable conditions. Therefore, according to the present invention, there is provided a method for increasing yield in plants grown under conditions of nutrient deficiency, which method comprises modulating expression in a plant of a nucleic acid encoding a WIL polypeptide or a SAWADEE-like polypeptide or a POZ-like polypeptide.

[0321] Performance of the methods of the invention gives plants grown under conditions of salt stress, increased yield relative to control plants grown under comparable conditions. Therefore, according to the present invention, there is provided a method for increasing yield in plants grown under conditions of salt stress, which method comprises modulating expression in a plant of a nucleic acid encoding a WIL polypeptide or a SAWADEE-like polypeptide or a POZ-like polypeptide.

[0322] The invention also provides genetic constructs and vectors to facilitate introduction and/or expression in plants of nucleic acids encoding WIL polypeptides or SAWADEE-like polypeptides or a POZ-like polypeptide. The gene constructs may be inserted into vectors, which may be commercially available, suitable for transforming into plants and suitable for expression of the gene of interest in the transformed cells. The invention also provides use of a gene construct as defined herein in the methods of the invention.

[0323] More specifically, the present invention provides a construct comprising:
[0324] (a) a nucleic acid encoding a WIL polypeptide or a SAWADEE-like polypeptide or a POZ-like polypeptide as defined above;
[0325] (b) one or more control sequences capable of driving expression of the nucleic acid sequence of (a); and optionally
[0326] (c) a transcription termination sequence.

[0327] Preferably, the nucleic acid encoding a WIL polypeptide or a SAWADEE-like polypeptide or a POZ-like polypeptide is as defined above. The term “control sequence” and “termination sequence” are as defined herein.

[0328] The invention furthermore provides plants transformed with a construct as described above. In particular, the invention provides plants transformed with a construct as described above, which plants have increased yield-related traits as described herein.

[0329] Plants are transformed with a vector comprising any of the nucleic acids described above. The skilled artisan is well aware of the genetic elements that must be present on the vector in order to successfully transform, select and propagate host cells containing the sequence of interest. The sequence of interest is operably linked to one or more control sequences, at least to a promoter.

[0330] Advantageously, any type of promoter, whether natural or synthetic, may be used to drive expression of the nucleic acid sequence, but preferably the promoter is of plant origin. A constitutive promoter is particularly useful in the methods. Preferably the constitutive promoter is a ubiquitous constitutive promoter of medium strength. See the “Definitions” section herein for definitions of the various promoter types.

[0331] It should be clear that the applicability of the present invention is not restricted to the WIL polypeptide or SAWADEE-like polypeptide or a POZ-like polypeptide-encoding nucleic acid represented by SEQ ID NO: 1 or SEQ ID NO: 324 or SEQ ID NO: 447, nor is the applicability of the invention restricted to expression of a WIL polypeptide or SAWADEE-like polypeptide or a POZ-like polypeptide-encoding nucleic acid when driven by a constitutive promoter.

[0332] The constitutive promoter is preferably a medium strength promoter. More preferably it is a plant derived promoter, such as a GOS2 promoter or a promoter of substantially the same strength and having substantially the same expression pattern (a functionally equivalent promoter), more preferably the promoter is the promoter GOS2 promoter from rice. Further preferably the constitutive promoter is represented by a nucleic acid sequence substantially similar to SEQ ID NO: 321 or SEQ ID NO: 443 or SEQ ID NO: 552, most preferably the constitutive promoter is as represented by SEQ ID NO: 321 or SEQ ID NO: 443 or SEQ ID NO: 552. See the “Definitions” section herein for further examples of constitutive promoters.

[0333] Optionally, one or more terminator sequences may be used in the construct introduced into a plant. Preferably, the construct comprises an expression cassette comprising a GOS2 promoter, substantially similar to SEQ ID NO: 320 or SEQ ID NO: 443 or SEQ ID NO: 553, and the nucleic acid encoding the WIL polypeptide or SAWADEE-like polypeptide or POZ-like polypeptide. More preferably, the expression cassette comprises the sequence represented by SEQ ID NO: 320 (pGOS2::WIL::t-zein sequence) or SEQ ID NO: 444 (pPRO::GOI::t-zein sequence) or SEQ ID NO: 553 (pPRO::GOI::t-zein sequence). Furthermore, one or more sequences encoding selectable markers may be present on the construct introduced into a plant.

[0334] According to a preferred feature of the invention, the modulated expression is increased expression. Methods for increasing expression of nucleic acids or genes, or gene products, are well documented in the art and examples are provided in the definitions section.

[0335] As mentioned above, a preferred method for modulating expression of a nucleic acid encoding a WIL polypeptide or a SAWADEE-like polypeptide or a POZ-like polypeptide is by introducing and expressing in a plant a nucleic acid encoding a WIL polypeptide or a SAWADEE-like polypeptide or a POZ-like polypeptide; however the effects of performing the method, i.e. enhancing yield-related traits may also be achieved using other well known techniques, including but not limited to T-DNA activation tagging, TILLING, homologous recombination. A description of these techniques is provided in the definitions section.

[0336] The invention also provides a method for the production of transgenic plants having enhanced yield-related traits relative to control plants, comprising introduction and expression in a plant of any nucleic acid encoding a WIL polypeptide or a SAWADEE-like polypeptide or a POZ-like polypeptide as defined hereinabove.

[0337] More specifically, the present invention provides a method for the production of transgenic plants having enhanced yield-related traits, particularly increased seed yield, which method comprises:
[0338] (i) introducing and expressing in a plant or plant cell a WIL polypeptide or a SAWADEE-like polypeptide or a POZ-like polypeptide-encoding nucleic acid or a genetic construct comprising a WIL polypeptide or a SAWADEE-like polypeptide or a POZ-like polypeptide-encoding nucleic acid; and
[0339] (ii) cultivating the plant cell under conditions promoting plant growth and development.

[0340] Cultivating the plant cell under conditions promoting plant growth and development, may or may not include regeneration and or growth to maturity.

[0341] The nucleic acid of (i) may be any of the nucleic acids capable of encoding a WIL polypeptide or a SAWADEE-like polypeptide or a POZ-like polypeptide as defined herein.

[0342] The nucleic acid may be introduced directly into a plant cell or into the plant itself (including introduction into a tissue, organ or any other part of a plant). According to a preferred feature of the present invention, the nucleic acid is preferably introduced into a plant by transformation. The term “transformation” is described in more detail in the “definitions” section herein.

[0343] The present invention clearly extends to any plant cell or plant produced by any of the methods described herein, and to all plant parts and propagules thereof. The present invention encompasses plants or parts thereof (including seeds) obtainable by the methods according to the present invention. The plants or parts thereof comprise a nucleic acid transgene encoding a WIL polypeptide or a SAWADEE-like polypeptide or a POZ-like polypeptide as defined above. The present invention extends further to encompass the progeny of a primary transformed or transfected cell, tissue, organ or whole plant that has been produced by any of the aforementioned methods, the only requirement being that progeny exhibit the same genotypic and/or phenotypic characteristic(s) as those produced by the parent in the methods according to the invention.

[0344] The invention also includes host cells containing an isolated nucleic acid encoding a WIL polypeptide or a SAWADEE-like polypeptide or a POZ-like polypeptide as defined hereinabove. Preferred host cells according to the invention are plant cells. Host plants for the nucleic acids or the vector used in the method according to the invention, the expression cassette or construct or vector are, in principle, advantageously all plants, which are capable of synthesizing the polypeptides used in the inventive method.

[0345] The methods of the invention are advantageously applicable to any plant, in particular to any plant as defined herein. Plants that are particularly useful in the methods of the invention include all plants which belong to the superfamily Viridiplantae, in particular monocotyledonous and dicotyledonous plants including fodder or forage legumes, ornamental plants, food crops, trees or shrubs.

[0346] According to an embodiment of the present invention, the plant is a crop plant. Examples of crop plants include but are not limited to chicory, carrot, cassaya, trefoil, soybean, beet, sugar beet, sunflower, canola, alfalfa, rapeseed, linseed, cotton, tomato, potato and tobacco.

[0347] According to another embodiment of the present invention, the plant is a monocotyledonous plant. Examples of monocotyledonous plants include sugarcane.

[0348] According to another embodiment of the present invention, the plant is a cereal. Examples of cereals include rice, maize, wheat, barley, millet, rye, triticale, sorghum, emmer, spelt, secale, einkorn, teff, milo and oats.

[0349] The invention also extends to harvestable parts of a plant such as, but not limited to seeds, leaves, fruits, flowers, stems, roots, rhizomes, tubers and bulbs, which harvestable parts comprise a recombinant nucleic acid encoding a WIL polypeptide or a SAWADEE-like polypeptide or a POZ-like polypeptide. The invention furthermore relates to products derived, preferably directly derived, from a harvestable part of such a plant, such as dry pellets or powders, oil, fat and fatty acids, starch or proteins.

[0350] The present invention also encompasses use of nucleic acids encoding WIL polypeptides or SAWADEE-like polypeptides or a POZ-like polypeptide as described herein and use of these WIL polypeptides or SAWADEE-like polypeptides or a POZ-like polypeptide in enhancing any of the aforementioned yield-related traits in plants. For example, nucleic acids encoding WIL polypeptide or SAWADEE-like polypeptide or a POZ-like polypeptide described herein, or the WIL polypeptides or SAWADEE-like polypeptides or a POZ-like polypeptide themselves, may find use in breeding programmes in which a DNA marker is identified which may be genetically linked to a WIL polypeptide or a SAWADEE-like polypeptide or a POZ-like polypeptide-encoding gene. The nucleic acids/genes, or the WIL polypeptides or SAWADEE-like polypeptides or a POZ-like polypeptide themselves may be used to define a molecular marker. This DNA or protein marker may then be used in breeding programmes to select plants having enhanced yield-related traits as defined hereinabove in the methods of the invention. Furthermore, allelic variants of a WIL polypeptide or a SAWADEE-like polypeptide or a POZ-like polypeptide-encoding nucleic acid/gene may find use in marker-assisted breeding programmes. Nucleic acids encoding WIL polypeptides or SAWADEE-like polypeptides or a POZ-like polypeptide may also be used as probes for genetically and physically mapping the genes that they are a part of, and as markers for traits linked to those genes. Such information may be useful in plant breeding in order to develop lines with desired phenotypes.

### EMBODIMENTS

[0351] 1. A method for enhancing yield-related traits in plants relative to control plants, comprising modulating expression in a plant of a nucleic acid encoding a WI12-like (WIL) polypeptide, wherein said WIL polypeptide comprises one or more of the following motifs:

(i) Motif 1:
(SEQ ID NO: 317)
IT[RQ][VL]REYFNTS[VL]TV[RT][DR][VLF],
(ii) Motif 2:
(SEQ ID NO: 318)
[PR][RS][AIV][YS]W[VI]H[AV]W[AT]V[ET][GD]G[RGI],
(iii) Motif 3:
(SEQ ID NO: 319)
[DS][DN][DR][DVA][DG][RK]S[VL]PGLVLA[IL]

[0352] 2. Method according to embodiment 1, wherein said nucleic acid encoding a WIL polypeptide comprises an Interpro accession IPR009798 WI12 domain, corresponding to PFAM accession number PF07107 WI12 domain.
[0353] 3. Method according to embodiment 1 or 2, wherein said modulated expression is effected by introducing and expressing in a plant said nucleic acid encoding said WIL polypeptide.
[0354] 4. Method according to any of the embodiments 1 to 3, wherein said enhanced yield-related traits comprise increased yield relative to control plants, and preferably comprise increased biomass and/or increased seed yield relative to control plants.
[0355] 5. Method according to any one of embodiments 1 to 4, wherein said enhanced yield-related traits are obtained under non-stress conditions.
[0356] 6. Method according to any one of embodiments 1 to 4, wherein said enhanced yield-related traits are obtained under conditions of drought stress, salt stress or nitrogen deficiency.
[0357] 7. Method according to any one of embodiments 1 to 6, wherein said nucleic acid encoding a WIL is of plant origin, preferably from a monocotyledonous plant, further preferably from the family Poaceae, more preferably from the genus Oryza, most preferably from Oryza sativa.
[0358] 8. Method according to any one of embodiments 1 to 7, wherein said nucleic acid encoding a WIL encodes any one of the polypeptides listed in Table A1 or is a portion of such a nucleic acid, or a nucleic acid capable of hybridising with such a nucleic acid.
[0359] 9. Method according to any one of embodiments 1 to 8, wherein said nucleic acid sequence encodes an orthologue or paralogue of any of the polypeptides given in Table A1.
[0360] 10. Method according to any one of embodiments 1 to 9, wherein said nucleic acid encodes the WIL polypeptide represented by SEQ ID NO: 2.
[0361] 11. Method according to any one of embodiments 1 to 10, wherein said nucleic acid is operably linked to a constitutive promoter, preferably to a medium strength constitutive promoter, preferably to a plant promoter, more preferably to a GOS2 promoter, most preferably to a GOS2 promoter from rice.
[0362] 12. Plant, plant part thereof, including seeds, or plant cell, obtainable by a method according to any one of embodiments 1 to 11, wherein said plant, plant part or plant cell comprises a recombinant nucleic acid encoding a WIL polypeptide as defined in any of embodiments 1, 2 and 7 to 10.
[0363] 13. Construct comprising:
   [0364] (i) nucleic acid encoding a WIL as defined in any of embodiments 1, 2 and 7 to 10;
   [0365] (ii) one or more control sequences capable of driving expression of the nucleic acid sequence of (i); and optionally
      [0366] (i) a transcription termination sequence.
[0367] 14. Construct according to embodiment 13, wherein one of said control sequences is a constitutive promoter, preferably a medium strength constitutive promoter, preferably to a plant promoter, more preferably a GOS2 promoter, most preferably a GOS2 promoter from rice.
[0368] 15. Use of a construct according to embodiment 13 or 14 in a method for making plants having enhanced yield-related traits, preferably increased yield relative to control plants, and more preferably increased seed yield and/or increased biomass relative to control plants.
[0369] 16. Plant, plant part or plant cell transformed with a construct according to embodiment 13 or 14.
[0370] 17. Method for the production of a transgenic plant having enhanced yield-related traits relative to control plants, preferably increased yield relative to control plants, and more preferably increased seed yield and/or increased biomass relative to control plants, comprising:
   [0371] (i) introducing and expressing in a plant cell or plant a nucleic acid encoding a WIL polypeptide as defined in any of embodiments 1, 2 and 7 to 10; and
   [0372] (ii) cultivating said plant cell or plant under conditions promoting plant growth and development.
[0373] 18. Transgenic plant having enhanced yield-related traits relative to control plants, preferably increased yield relative to control plants, and more preferably increased seed yield and/or increased biomass, resulting from modulated expression of a nucleic acid encoding a WIL polypeptide as defined in any of embodiments 1, 2 and 7 to 10 or a transgenic plant cell derived from said transgenic plant.
[0374] 19. Transgenic plant according to embodiment 12, 16 or 18, or a transgenic plant cell derived therefrom, wherein said plant is a crop plant, such as beet, sugarbeet or alfalfa; or a monocotyledonous plant such as sugarcane; or a cereal, such as rice, maize, wheat, barley, millet, rye, triticale, sorghum, emmer, spelt, secale, einkorn, teff, milo or oats.
[0375] 20. Harvestable parts of a plant according to embodiment 19, wherein said harvestable parts are preferably shoot biomass and/or seeds.
[0376] 21. Products derived from a plant according to embodiment 19 and/or from harvestable parts of a plant according to embodiment 20.
[0377] 22. Use of a nucleic acid encoding a WIL polypeptide as defined in any of embodiments 1, 2 and 7 to 10 for enhancing yield-related traits in plants relative to control plants, preferably for increasing yield, and more preferably for increasing seed yield and/or for increasing biomass in plants relative to control plants.
[0378] 23. A method for enhancing yield-related traits in plants relative to control plants, comprising modulating expression in a plant of a nucleic acid encoding a SAWADEE-like polypeptide, wherein said SAWADEE-like polypeptide comprises (i) a homeodomain, (ii) a SAWADEE domain and (iii) a nuclear localisation signal (NLS).
[0379] 24. Method according to embodiment 23, wherein said homeodomain is represented by the following sequence NGGPSFRFMQYEVTEMDAILQEHHNMMPAREVLVSLAEKFS ESSERKGKIQVQMKQVWNWFQNRRYAIRAKS or by a sequence having in increasing order of preference at least 60%, 61%, 62%, 63%, 64%, 65%, 66%, 67%, 68%, 69%, 70%, 71%, 72%, 73%, 74%, 75%, 76%, 77%, 78%, 79%, 80%, 81%, 82%, 83%, 84%, 85%, 86%, 87%, 88%, 89%, 90%, 91%, 92%, 93%, 94%, 95%, 96%, 97%, 98%, or 99% sequence identity to Domain I or by a sequence falling under Inter Pro accession number IPRO01356.
[0380] 25. Method according to embodiment 23 or 24, wherein said SAWADEE domain comprises each of Motifs 4, 5 and 6 as follows and comprises the conserved cysteine and histidine residues indicated in bold and underlined or as indicated in the alignment of FIG. 3
   [0381] Motif 4
   [0382] [PV]GDL[IV]LCFQEGK[ED]QALY[FY]DAHVL[DE][IA]QR[RK][RL]HD[VI]RGCRC[RI]F [LV]VRYDHDQSEE, or a motif having in increasing order of preference at least 60%, 61%, 62%, 63%, 64%, 65%, 66%, 67%, 68%, 69%, 70%, 71%, 72%, 73%, 74%, 75%, 76%, 77%, 78%, 79%, 80%, 81%, 82%, 83%, 84%, 85%, 86%, 87%, 88%, 89%, 90%, 91%, 92%, 93%, 94%, 95%, 96%, 97%, 98%, or 99% sequence identity to the Motif 4; and
   [0383] Motif 5
   [0384] EV[RL]VRF[AS]GFG[AP]EEDEW[VI]NV[RK][KR], or a motif having in increasing order of preference at least 60%, 61%, 62%, 63%, 64%, 65%, 66%, 67%, 68%, 69%, 70%, 71%, 72%, 73%, 74%, 75%, 76%, 77%, 78%, 79%, 80%, 81%, 82%, 83%, 84%, 85%, 86%, 87%, 88%, 89%, 90%, 91%, 92%, 93%, 94%, 95%, 96%, 97%, 98%, or 99% sequence identity to the Motif 5; and
   [0385] Motif 6
   [0386] [RK]DGAWYDVA[AST]FL[ST][HY]R, or a motif having in increasing order of preference at least 60%, 61%, 62%, 63%, 64%, 65%, 66%, 67%, 68%, 69%, 70%, 71%, 72%, 73%, 74%, 75%, 76%, 77%, 78%, 79%, 80%, 81%, 82%, 83%, 84%, 85%, 86%, 87%, 88%, 89%, 90%, 91%, 92%, 93%, 94%, 95%, 96%, 97%, 98%, or 99% sequence identity to the Motif 6.
[0387] 26. Method according to any one of embodiments 23 to 25, wherein said modulated expression is effected by introducing and expressing in a plant said nucleic acid encoding said SAWADEE-like polypeptide.
[0388] 27. Method according to any one of embodiments 23 to 26, wherein said enhanced yield-related traits comprise increased biomass and/or increased seed yield relative to control plants.
[0389] 28. Method according to any one of embodiments 23 to 27, wherein said enhanced yield-related traits are obtained under non-stress conditions.
[0390] 29. Method according to any one of embodiments 23 to 27, wherein said enhanced yield-related traits are obtained under conditions of nitrogen deficiency.
[0391] 30. Method according to any one of embodiments 23 to 29, wherein said nucleic acid encoding a SAWADEE-like polypeptide is of plant origin, further preferably from a dicotyledonous plant, more preferably from the family brassicaceae or from the populus genus, most preferably the nucleic acid is from Populus trichocarpa.
[0392] 31. Method according to any one of embodiments 23 to 30, wherein said nucleic acid encoding a SAWADEE-like polypeptide encodes any one of the polypeptides listed in Table A2 or is a portion of such a nucleic acid, or a nucleic acid capable of hybridising with such a nucleic acid and/or wherein said nucleic acid sequence encodes an orthologue or paralogue of any of the polypeptides given in Table A2.
[0393] 32. Method according to any one of embodiments 23 to 31, wherein said nucleic acid is operably linked to a constitutive promoter, preferably to a medium strength constitutive promoter, preferably to a plant promoter, more preferably to a GOS2 promoter, most preferably to a GOS2 promoter from rice.
[0394] 33. Plant, plant part thereof, including seeds, or plant cell, obtainable by a method according to any one of embodiments 23 to 32, wherein said plant, plant part or plant cell comprises a recombinant nucleic acid encoding a SAWADEE-like polypeptide as defined in any of embodiments 23 to 25.
[0395] 34. Construct comprising:
   [0396] (i) nucleic acid encoding a SAWADEE-like polypeptide as defined in any of embodiments 23 to 25;
   [0397] (ii) one or more control sequences capable of driving expression of the nucleic acid sequence of (i); and optionally
   [0398] (ii) a transcription termination sequence.
[0399] 35. Construct according to embodiment 34, wherein one of said control sequences is a constitutive promoter, preferably a medium strength constitutive promoter, preferably to a plant promoter, more preferably a GOS2 promoter, most preferably a GOS2 promoter from rice.
[0400] 36. Use of a construct according to embodiment 34 or 35 in a method for making plants having enhanced yield-related traits relative to control plants.
[0401] 37. Plant, plant part or plant cell transformed with a construct according to embodiment 34 or 35.
[0402] 38. Method for the production of a transgenic plant having enhanced yield-related traits relative to control plants, comprising:
   [0403] (i) introducing and expressing in a plant cell or plant a nucleic acid encoding a SAWADEE-like polypeptide as defined in any of embodiments 23 to 25; and
   [0404] (ii) cultivating said plant cell or plant under conditions promoting plant growth and development.
[0405] 39. Transgenic plant having enhanced yield-related traits relative to control plants, preferably increased yield relative to control plants, and more preferably increased seed yield and/or increased biomass, resulting from modulated expression of a nucleic acid encoding a SAWADEE-like polypeptide as defined in any of embodiments 23 to 25 or a transgenic plant cell derived from said transgenic plant.
[0406] 40. Transgenic plant according to any of embodiments 33, 37 or 39, or a transgenic plant cell derived therefrom, wherein said plant is a crop plant, such as beet, sugarbeet or alfalfa; or a monocotyledonous plant such as sugarcane; or a cereal, such as rice, maize, wheat, barley, millet, rye, triticale, sorghum, emmer, spelt, secale, einkorn, teff, milo or oats.
[0407] 41. Harvestable parts of a plant according to embodiment 40, wherein said harvestable parts are preferably shoot biomass and/or seeds.
[0408] 42. Products derived from a plant according to embodiment 40 and/or from harvestable parts of a plant according to embodiment 41.
[0409] 43. Use of a nucleic acid encoding a SAWADEE-like polypeptide as defined in any of embodiments 23 to 25 for enhancing yield-related traits in plants relative to control plants, preferably for increasing yield, and more preferably for increasing seed yield and/or for increasing biomass in plants relative to control plants.
[0410] 44. A method for enhancing yield-related traits in plants relative to control plants, comprising modulating expression in a plant of a nucleic acid encoding a POZ-like polypeptide, wherein said POZ-like polypeptide comprises a PFam PF00651 domain.
[0411] 45. Method according to embodiment 44, wherein said POZ-like polypeptide comprises one or more of the following motifs:

(iv) Motif 7:
(SEQ ID NO: 543)
AH[RK]A[VI]L[AS]A[RTS]SPVF[REH]SMF[SL]H[DN]L[KR]
EKE[SL]S[IT][IV][NDH]I[SE]DMS[TL]E[SA]C[QTM]A[LF]
L[SN]Y[LI]YG[NT]I,
(v) Motif 8:
(SEQ ID NO: 544)
[DE][LF][WL]KHRLALL[GR]AA[DN]KYDI[VG]DLK[END]AC
[EH]ESLLEDI[DN][ST][KG]NVLERLQEAWLYQL,
(vi) Motif 9:
(SEQ ID NO: 545)
[KR]VET[ILT]SRLAQWRI[DE]N[LF][GT][PAS][SC][TS]Y
[RK][KR]SDPFK[IV]G[IL]WNW[HY]LS[VI]E[KR]N

[0412] 46. Method according to embodiment 44 or 45, wherein said nucleic acid encoding a POZ-like encodes any one of the polypeptides listed in Table A3 or is a portion of such a nucleic acid, or a nucleic acid capable of hybridising with such a nucleic acid.
[0413] 47. Method according to embodiment 44 or 45, wherein said nucleic acid sequence encodes an orthologue or paralogue of any of the polypeptides given in Table A3.
[0414] 48. Method according to embodiment 44 or 45, wherein said nucleic acid encoding a POZ-like is of plant origin, preferably from a dicotyledonous plant, further preferably from the family Solanaceae, more preferably from the genus Lycopersicon, most preferably from Lycopersicon exculentum.
[0415] 49. Method according to embodiment 48, wherein said nucleic acid encodes the polypeptide represented by SEQ ID NO: 448.
[0416] 50. Method according to any one of embodiments 44 to 49, wherein said modulated expression is effected by introducing and expressing in a plant said nucleic acid encoding said POZ-like polypeptide.
[0417] 51. Method according to any one of embodiments 44 to 50, wherein said enhanced yield-related traits comprise increased yield relative to control plants, and preferably comprise increased biomass and/or increased seed yield relative to control plants.
[0418] 52. Method according to any one of embodiments 44 to 51, wherein said enhanced yield-related traits are obtained under conditions of nitrogen deficiency.
[0419] 53. Method according to any one of embodiments 50 to 52, wherein said nucleic acid is operably linked to a constitutive promoter, preferably to a medium strength constitutive promoter, preferably to a plant promoter, more preferably to a GOS2 promoter, most preferably to a GOS2 promoter from rice.
[0420] 54. Plant, plant part thereof, including seeds, or plant cell, obtainable by a method according to any one of embodiments 44 to 53, wherein said plant, plant part or plant cell comprises a recombinant nucleic acid encoding a POZ-like polypeptide as defined in any of embodiments 44 to 49.
[0421] 55. Construct comprising:
   [0422] (i) nucleic acid encoding a POZ-like as defined in any of embodiments 44 to 49;
   [0423] (ii) one or more control sequences capable of driving expression of the nucleic acid sequence of (i); and optionally
   [0424] (iii) a transcription termination sequence.
[0425] 56. Construct according to embodiment 55, wherein one of said control sequences is a constitutive promoter, preferably a medium strength constitutive promoter, preferably to a plant promoter, more preferably a GOS2 promoter, most preferably a GOS2 promoter from rice.
[0426] 57. Use of a construct according to embodiment 55 or 56 in a method for making plants having enhanced yield-related traits, preferably increased yield relative to control plants, and more preferably increased seed yield and/or increased biomass relative to control plants.
[0427] 58. Plant, plant part or plant cell transformed with a construct according to embodiment 55 or 56.
[0428] 59. Method for the production of a transgenic plant having enhanced yield-related traits relative to control plants, preferably increased yield relative to control plants, and more preferably increased seed yield and/or increased biomass relative to control plants, comprising:
   [0429] (i) introducing and expressing in a plant cell or plant a nucleic acid encoding a POZ-like polypeptide as defined in any of embodiments 44 to 49; and
   [0430] (ii) cultivating said plant cell or plant under conditions promoting plant growth and development.
[0431] 60. Transgenic plant having enhanced yield-related traits relative to control plants, preferably increased yield relative to control plants, and more preferably increased seed yield and/or increased biomass, resulting from modulated expression of a nucleic acid encoding a POZ-like polypeptide as defined in any of embodiments 44 to 49 or a transgenic plant cell derived from said transgenic plant.
[0432] 61. Transgenic plant according to embodiment 54, 58 or 60, or a transgenic plant cell derived therefrom, wherein said plant is a crop plant, such as beet, sugarbeet or alfalfa; or a monocotyledonous plant such as sugarcane; or a cereal, such as rice, maize, wheat, barley, millet, rye, triticale, sorghum, emmer, spelt, secale, einkorn, teff, milo or oats.
[0433] 62. Harvestable parts of a plant according to embodiment 61, wherein said harvestable parts are preferably shoot biomass and/or seeds.
[0434] 63. Products derived from a plant according to embodiment 61 and/or from harvestable parts of a plant according to embodiment 62.
[0435] 64. Use of a nucleic acid encoding a POZ-like polypeptide as defined in any of embodiments 44 to 49 for enhancing yield-related traits in plants relative to control plants, preferably for increasing yield, and more preferably for increasing seed yield and/or for increasing biomass in plants relative to control plants.
[0436] 65. An isolated nucleic acid molecule selected from:
   [0437] (i) a nucleic acid represented by any of SEQ ID NO: 457, SEQ ID NO: 523, SEQ ID NO: 529, and SEQ ID NO: 535;
   [0438] (ii) the complement of a nucleic acid represented by SEQ ID NO: 457, SEQ ID NO: 523, SEQ ID NO: 529, and SEQ ID NO: 535;
   [0439] (iii) a nucleic acid encoding a POZ-like polypeptide having in increasing order of preference at least 50%, 51%, 52%, 53%, 54%, 55%, 56%, 57%, 58%, 59%, 60%, 61%, 62%, 63%, 64%, 65%, 66%, 67%, 68%, 69%, 70%, 71%, 72%, 73%, 74%, 75%, 76%, 77%, 78%, 79%, 80%, 81%, 82%, 83%, 84%, 85%, 86%, 87%, 88%, 89%, 90%, 91%, 92%, 93%, 94%, 95%, 96%, 97%, 98%, or 99% sequence identity to any of the amino acid sequences represented by SEQ ID NO: 458, SEQ ID NO: 524, SEQ ID NO: 530, and SEQ ID NO: 536, and additionally or alternatively comprising one or more motifs having in increasing order of preference at least 50%, 55%, 60%, 65%, 70%, 75%, 80%, 85%, 90%, 95%, 96%, 97%, 98%, 99% or more sequence identity to any one or more of the motifs given in SEQ ID NO: 543 to SEQ ID NO: 551, and further preferably conferring enhanced yield-related traits relative to control plants.
   [0440] (iv) a nucleic acid molecule which hybridizes with a nucleic acid molecule of (i) to (iii) under high stringency hybridization conditions and preferably confers enhanced yield-related traits relative to control plants.
[0441] 66. An isolated polypeptide selected from:
   [0442] (v) an amino acid sequence represented by any of SEQ ID NO: 458, SEQ ID NO: 524, SEQ ID NO: 530, and SEQ ID NO: 536;
   [0443] (vi) an amino acid sequence having, in increasing order of preference, at least 50%, 51%, 52%, 53%, 54%, 55%, 56%, 57%, 58%, 59%, 60%, 61%, 62%, 63%, 64%, 65%, 66%, 67%, 68%, 69%, 70%, 71%, 72%, 73%, 74%, 75%, 76%, 77%, 78%, 79%, 80%, 81%, 82%, 83%, 84%, 85%, 86%, 87%, 88%, 89%, 90%, 91%, 92%, 93%, 94%, 95%, 96%, 97%, 98%, or 99% sequence identity to any of the amino acid sequences represented SEQ ID NO: 458, SEQ ID NO: 524, SEQ ID NO: 530, and SEQ ID NO: 536, and additionally or alternatively comprising one or more motifs having in increasing order of preference at least 50%, 55%, 60%, 65%, 70%, 75%, 80%, 85%, 90%, 95%, 96%, 97%, 98%, 99% or more sequence identity to any one or more of the motifs given in SEQ ID NO: 543 to SEQ ID NO: 551, and further preferably conferring enhanced yield-related traits relative to control plants;
   [0444] derivatives of any of the amino acid sequences given in (i) or (ii) above.

### DESCRIPTION OF FIGURES

[0445] The present invention will now be described with reference to the following figures in which:

[0446] FIG. 1 represents the domain structure of SEQ ID NO: 2 with conserved motifs.

[0447] FIG. 2 represents the binary vector used for increased expression in Oryza sativa of a WIL-encoding nucleic acid under the control of a rice GOS2 promoter (pGOS2).

[0448] FIG. 3 represents a multiple alignment of various SAWADEE-like polypeptides. The alignment was done using AlignX from VNTI as described further in Example 2 herein. The alignment may be used for defining further motifs using conserved amino acids.

[0449] FIG. 4 shows an example of a phylogenetic tree showing various homeodomain sequences with the SAWADEE group highlighted. The tree is taken from Mukherjee et al. (Mol. Biol. Evol. 26(12):2775-2794, 2009).

[0450] FIG. 5 represents the binary vector used for increased expression in Oryza sativa of a SAWADEE-like-encoding nucleic acid under the control of a rice GOS2 promoter (pGOS2).

[0451] FIG. 6 shows the MATGAT table (see Example 3) for the global similarity and identity over the full length of the SAWADEE-like polypeptide sequences. Sequence similarity is shown in the bottom half of the dividing line and sequence identity is shown in the top half of the diagonal dividing line. Parameters used in the comparison were: Scoring matrix: Blosum62, First Gap: 12, Extending Gap: 2.

[0452] FIG. 7 represents the domain structure of SEQ ID NO: 448 with the BTB/POZ domain in italics, motifs 7/10, 8/11 and 9/12 underlined and motifs 13, 14 and 15 in bold.

[0453] FIG. 8 represents a multiple alignment of various POZ-like polypeptides from Class 2 and Class 3. The asterisks indicate identical amino acids among the various protein sequences, colons represent highly conserved amino acid substitutions, and the dots represent less conserved amino acid substitution; on other positions there is no sequence conservation. These alignments can be used for defining further motifs, when using conserved amino acids.

[0454] FIG. 9 shows phylogenetic tree of POZ-like polypeptides, (explanation of tree drawing). The proteins were aligned using MAFT (Katoh and Toh (2008). A neighbour-joining tree was calculated using QuickTree1.1 (Howe et al. (2002). A rectangular cladogram was drawn using Dendroscope2.0.1 (Huson et al. (2007). At e=1e-70, all representative members were recovered. The tree was generated using representative members of each cluster. SEQ ID NO: 448 is represented as S. lycopersicum_POZ#1_CI-3 and belongs to the CI-3 indicated in the tree.

[0455] FIG. 10 shows the MATGAT table of Class 3 POZ-like proteins (Example 3).

[0456] FIG. 11 represents the binary vector used for increased expression in Oryza sativa of a POZ-like-encoding nucleic acid under the control of a rice GOS2 promoter (pGOS2).

### EXAMPLES

[0457] The present invention will now be described with reference to the following examples, which are by way of illustration only. The following examples are not intended to limit the scope of the invention.

[0458] DNA manipulation: unless otherwise stated, recombinant DNA techniques are performed according to standard protocols described in (Sambrook (2001) Molecular Cloning: a laboratory manual, 3rd Edition Cold Spring Harbor Laboratory Press, CSH, New York) or in Volumes 1 and 2 of Ausubel et al. (1994), Current Protocols in Molecular Biology, Current Protocols. Standard materials and methods for plant molecular work are described in Plant Molecular Biology Labfax (1993) by R. D. D. Croy, published by BIOS Scientific Publications Ltd (UK) and Blackwell Scientific Publications (UK).

### Example 1

### Identification of Sequences Related to SEQ ID NO: 1 and SEQ ID NO: 2 or SEQ ID NO: 324 and SEQ ID NO: 325 or SEQ ID NO: 447 and SEQ ID NO:448

[0459] Sequences (full length cDNA, ESTs or genomic) related to SEQ ID NO: 1 and SEQ ID NO: 2 or SEQ ID NO: 324 and SEQ ID NO: 325 or SEQ ID NO: 447 and SEQ ID NO:448 were identified amongst those maintained in the Entrez Nucleotides database at the National Center for Biotechnology Information (NCBI) using database sequence search tools, such as the Basic Local Alignment Tool (BLAST) (Altschul et al. (1990) J. Mol. Biol. 215:403-410; and Altschul et al. (1997) Nucleic Acids Res. 25:3389-3402). The program is used to find regions of local similarity between sequences by comparing nucleic acid or polypeptide sequences to sequence databases and by calculating the statistical significance of matches. For example, the polypeptide encoded by the nucleic acid of SEQ ID NO: 1 or SEQ ID NO: 324 or SEQ ID NO: 447 was used for the TBLASTN algorithm, with default settings and the filter to ignore low complexity sequences set off. The output of the analysis was viewed by pairwise comparison, and ranked according to the probability score (E-value), where the score reflect the probability that a particular alignment occurs by chance (the lower the E-value, the more significant the hit). In addition to E-values, comparisons were also scored by percentage identity. Percentage identity refers to the number of identical nucleotides (or amino acids) between the two compared nucleic acid (or polypeptide) sequences over a particular length. In some instances, the default parameters may be adjusted to modify the stringency of the search. For example the E-value may be increased to show less stringent matches. This way, short nearly exact matches may be identified.

[0460] Table A1 provides a list of nucleic acid sequences related to SEQ ID NO: 1 and SEQ ID NO: 2.

TABLE A1
Examples of WIL nucleic acids and polypeptides:

| | Nucleic acid | Protein |
|---|---|---|
| Plant Source | SEQ ID NO: | SEQ ID NO: |
| O. sativa_LOC_Os05g27590.1 | 1 | 2 |
| A. aestivalis_2721 | 3 | 4 |
| A. lyrata_928811 | 5 | 6 |
| A. majus_TA6818_4151 | 7 | 8 |
| A. thaliana_AT3G10985_SAG20 | 9 | 10 |
| B. napus_TC66358 | 11 | 12 |
| B. napus_TC90195 | 13 | 14 |
| B. oleracea_EH418308 | 15 | 16 |
| B. oleracea_TA5828_3712 | 17 | 18 |
| C. annuum_TC20360 | 19 | 20 |
| C. canephora_TC544 | 21 | 22 |
| C. clementina_TC31489 | 23 | 24 |
| C. intybus_TA2652_13427 | 25 | 26 |
| C. longa_TA28_136217 | 27 | 28 |
| C. longa_TA415_136217 | 29 | 30 |
| C. sinensis_TC10883 | 31 | 32 |
| C. solstitialis_EH779943 | 33 | 34 |
| C. solstitialis_EH784157 | 35 | 36 |
| C. solstitialis_EH784275 | 37 | 38 |
| C. solstitialis_TA2931_347529 | 39 | 40 |
| C. solstitialis_TA5207_347529 | 41 | 42 |
| C. tinctorius_EL411491 | 43 | 44 |
| C. tinctorius_TA3761_4222 | 45 | 46 |
| E. esula_TC4729 | 47 | 48 |
| E. tirucalli_TA2125_142860 | 49 | 50 |
| F. vesca_TA9047_57918 | 51 | 52 |
| G. arboreum_TA7168_29729 | 53 | 54 |
| G. hirsutum_TC160651 | 55 | 56 |
| G. hirsutum_TC174043 | 57 | 58 |
| G. max_Glyma11g35800.1 | 59 | 60 |
| G. max_Glyma14g38040.1 | 61 | 62 |
| G. max_Glyma18g02610.1 | 63 | 64 |
| G. max_Glyma18g06340.1 | 65 | 66 |
| G. raimondii_TC981 | 67 | 68 |
| H. annuus_TC39814 | 69 | 70 |
| H. annuus_TC54842 | 71 | 72 |
| H. exilis_TA2428_400408 | 73 | 74 |
| H. paradoxus_EL485276 | 75 | 76 |
| H. petiolaris_DY954048 | 77 | 78 |
| H. petiolaris_TA817_4234 | 79 | 80 |
| I. batatas_TA1754_4120 | 81 | 82 |
| I. batatas_X17553 | 83 | 84 |
| I. nil_TC7046 | 85 | 86 |
| J. regia_TA765_51240 | 87 | 88 |
| J. regia_TA930_51240 | 89 | 90 |
| L. albus_CA411392 | 91 | 92 |
| L. bicolor_TA1713_293754 | 93 | 94 |
| L. japonicus_TC37474 | 95 | 96 |
| L. perennis_DW102473 | 97 | 98 |
| L. sativa_BQ870888 | 99 | 100 |
| M. acuminata_ES432927 | 101 | 102 |
| M. acuminata_ES434998 | 103 | 104 |
| M. crystallinum_AF117224 | 105 | 106 |
| M. domestica_TC30277 | 107 | 108 |
| M. domestica_TC32472 | 109 | 110 |
| M. esculenta_TA5785_3983 | 111 | 112 |
| M. guttatus_CV516184 | 113 | 114 |
| M. sativa_TA1932_3879 | 115 | 116 |
| M. truncatula_AC149303_43.4 | 117 | 118 |
| M. truncatula_CR932960_8.4 | 119 | 120 |
| N. tabacum_TC50261 | 121 | 122 |
| N. tabacum_TC55413 | 123 | 124 |
| O. basilicum_TA3074_39350 | 125 | 126 |
| P. armeniaca_TA3431_36596 | 127 | 128 |
| P. canadensis_CX177496 | 129 | 130 |
| P. deltoides_TA2827_3696 | 131 | 132 |
| P. euphratica_TA3343_75702 | 133 | 134 |
| P. ginseng_TA610_4054 | 135 | 136 |
| P. hybrida_CV295832 | 137 | 138 |
| P. hybrida_TC1978 | 139 | 140 |
| P. juliflora_TA123_13230 | 141 | 142 |
| P. persica_BU048459 | 143 | 144 |
| P. trichocarpa_656319 | 145 | 146 |
| P. trichocarpa_659435 | 147 | 148 |
| P. trifoliata_TA5394_37690 | 149 | 150 |
| P. vulgaris_FE899406 | 151 | 152 |
| P. vulgaris_TC15039 | 153 | 154 |
| R. communis_B9S498 | 155 | 156 |
| R. communis_B9S499 | 157 | 158 |
| S. habrochaites_DN170643 | 159 | 160 |
| S. habrochaites_TA2428_62890 | 161 | 162 |
| S. henryi_DT578160 | 163 | 164 |
| S. lycopersicum_TC193018 | 165 | 166 |
| S. lycopersicum_TC198624 | 167 | 168 |
| S. pennellii_AW618204 | 169 | 170 |
| S. tuberosum_TC166671 | 171 | 172 |
| S. tuberosum_TC192723 | 173 | 174 |
| T. hispida_TA1874_189793 | 175 | 176 |
| T. kok-saghyz_TA1355_333970 | 177 | 178 |
| T. salsuginea_TA1700_72664 | 179 | 180 |
| V. vinifera_GSVIVT00023990001 | 181 | 182 |
| V. vinifera_GSVIVT00029390001 | 183 | 184 |
| Z. aethiopica_TA1298_69721 | 185 | 186 |
| Z. officinale_TA5741_94328 | 187 | 188 |
| Z. officinale_TA676_94328 | 189 | 190 |
| A. lyrata_486893 | 191 | 192 |
| A. thaliana_AT5G01740 | 193 | 194 |
| B. napus_TC103407 | 195 | 196 |
| B. oleracea_AM388237 | 197 | 198 |
| C. japonica_BW996295 | 199 | 200 |
| C. sinensis_EY757300 | 201 | 202 |
| C. solstitialis_TA4582_347529 | 203 | 204 |
| Closterium_peracerosum_AU295957 | 205 | 206 |
| F. arundinacea_TC7405 | 207 | 208 |
| F. vesca_TA12299_57918 | 209 | 210 |
| G. max_Glyma03g05050.1 | 211 | 212 |
| G. max_Glyma09g41610.1 | 213 | 214 |
| G. max_Glyma11g29740.1 | 215 | 216 |
| G. max_Glyma18g06350.1 | 217 | 218 |
| G. max_Glyma18g44090.1 | 219 | 220 |
| H. annuus_TC50100 | 221 | 222 |
| H. exilis_EE632046 | 223 | 224 |
| H. vulgare_TC169048 | 225 | 226 |
| H. vulgare_TC175697 | 227 | 228 |
| M. domestica_TC38268 | 229 | 230 |
| M. domestica_TC41353 | 231 | 232 |
| M. polymorpha_TA1396_3197 | 233 | 234 |
| N. benthamiana_TC15798 | 235 | 236 |
| N. tabacum_TC64094 | 237 | 238 |
| O. sativa_LOC_Os03g18770.1 | 239 | 240 |
| O. sativa_LOC_Os05g27580.1 | 241 | 242 |
| O. sativa_LOC_Os07g49114.1 | 243 | 244 |
| P. coccineus_TA4345_3886 | 245 | 246 |
| P. glauca_DR576888 | 247 | 248 |
| P. glauca_TA17913_3330 | 249 | 250 |
| P. patens_122265 | 251 | 252 |
| P. patens_146634 | 253 | 254 |
| P. patens_152838 | 255 | 256 |
| P. pinaster_TA4600_71647 | 257 | 258 |
| P. sitchensis_DR529510 | 259 | 260 |
| P. taeda_C0170924 | 261 | 262 |
| P. taeda_CX651380 | 263 | 264 |
| P. taeda_TA17097_3352 | 265 | 266 |
| P. taeda_TA18669_3352 | 267 | 268 |
| P. taeda_TA25386_3352 | 269 | 270 |
| P. taeda_TA4810_3352 | 271 | 272 |
| P. trichocarpa_777966 | 273 | 274 |
| P. trichocarpa_SAG20 | 275 | 276 |
| P. virgatum_TC23827 | 277 | 278 |
| P. virgatum_TC28852 | 279 | 280 |
| P. virgatum_TC33105 | 281 | 282 |
| P. virgatum_TC49878 | 283 | 284 |
| P. vulgaris_TC12329 | 285 | 286 |
| S. bicolor_Sb01g038030.1 | 287 | 288 |
| S. bicolor_Sb02g043820.1 | 289 | 290 |
| S. bicolor_Sb09g015680.1 | 291 | 292 |
| S. lepidophylla_TA463_59777 | 293 | 294 |
| S. moellendorflii_73443 | 295 | 296 |
| S. officinarum_CA086848 | 297 | 298 |
| S. officinarum_CA152035 | 299 | 300 |
| T. aestivum_TC305004 | 301 | 302 |
| T. caerulescens_DN925238 | 303 | 304 |
| T. ruralis_CN207101 | 305 | 306 |
| T. turgidum_AJ717244 | 307 | 308 |
| V. vinifera_GSVIVT00037433001 | 309 | 310 |
| Z. mays_C0468178 | 311 | 312 |
| Z. mays_TC460886 | 313 | 314 |
| Z. mays_TC474665 | 315 | 316 |

[0461] Table A2 provides a list of nucleic acid sequences related to SEQ ID NO: 324 and SEQ ID NO: 325.

TABLE A2
Examples of SAWADEE-LIKE nucleic acids and polypeptides:

| | Nucleic acid | Protein |
|---|---|---|
| Plant Source | SEQ ID NO: | SEQ ID NO: |
| Poptr_SAWADEE | 324 | 325 |
| Aquilegia_sp_TC20929 | 326 | 327 |
| A. lyrata_334813 | 328 | 329 |
| A. thaliana_AT3G18380.1 | 330 | 331 |
| A. thaliana_AT3G18380.2 | 332 | 333 |
| A. thaliana_AT1G15215.3 | 334 | 335 |
| B. napus_TC87129 | 336 | 337 |
| B. napus_BN06MC05266_42322866@5253 | 338 | 339 |
| B. oleracea_TA11471_3712 | 340 | 341 |
| C. annuum_TC19347 | 342 | 343 |
| C. maculosa_TA3277_215693 | 344 | 345 |
| C. solstitialis_TA4707_347529 | 346 | 347 |
| F. vesca_TA9550_57918 | 348 | 349 |
| G. max_Glyma06g35560.1 | 350 | 351 |
| G. max_Glyma12g18490.1 | 352 | 353 |
| G. max_Glyma04g09100.1 | 354 | 355 |
| G. max_Glyma06g09200.1 | 356 | 357 |
| G. max_Glyma07g01880.1 | 358 | 359 |
| G. max_Glyma08g21560.1 | 360 | 361 |
| G. hirsutum_TC160629 | 362 | 363 |
| H. vulgare_TC173170 | 364 | 365 |
| H. vulgare_TC188512 | 366 | 367 |
| I. nil_TC11734 | 368 | 369 |
| L. perennis_TA4007_43195 | 370 | 371 |
| L. japonicus_TC35866 | 372 | 373 |
| N. tabacum_TC61019 | 374 | 375 |
| N. tabacum_TC73014 | 376 | 377 |
| N. tabacum_TC63901 | 378 | 379 |
| O. basilicum_TA1574_39350 | 380 | 381 |
| O. sativa_LOC_Os06g29020.1 | 382 | 383 |
| O. sativa_LOC_Os09g17770.1 | 384 | 385 |
| P. virgatum_TC41535 | 386 | 387 |
| P. taeda_TA15893_3352 | 388 | 389 |
| P. taeda_TA7909_3352 | 390 | 391 |
| P. trichocarpa_829564 | 392 | 393 |
| S. lepidophylla_TA371_59777 | 394 | 395 |
| S. moellendorffii_405582 | 396 | 397 |
| S. moellendorffii_411966 | 398 | 399 |
| S. lycopersicum_TC216862 | 400 | 401 |
| S. lycopersicum_TC192705 | 402 | 403 |
| S. tuberosum_TC191509 | 404 | 405 |
| S. bicolor_Sb02g020940.1 | 406 | 407 |
| S. bicolor_Sb02g022620.1 | 408 | 409 |
| Triae_SAWADEE like | 410 | 411 |
| Triphysaria_sp_TC5080 | 412 | 413 |
| Triphysaria_sp_TC5234 | 414 | 415 |
| T. aestivum_TC354489 | 416 | 417 |
| T. aestivum_TC286642 | 418 | 419 |
| T. aestivum_c50845464@12237 | 420 | 421 |
| V. vinifera_GSVIVT00034323001 | 422 | 423 |
| V. vinifera_GSVIVT00032090001 | 424 | 425 |
| Z. mays_TC547075 | 426 | 427 |
| Z. mays_TC461823 | 428 | 429 |
| Z. mays_TC471127 | 430 | 431 |
| Z. mays_c57699334gm030403@2933 | 432 | 433 |
| Z. mays_ZMO7MSbpsHQ_ | 434 | 435 |
| 57699334.f01@39738 | | |
| Z. mays_ZMO7MSbpsHQ_ | 436 | 437 |
| 59186353.f01@41850 | | |

[0462] Table A3 provides a list of nucleic acid sequences related to SEQ ID NO: 447 and SEQ ID NO: 448.

TABLE A3
Examples of POZ-like nucleic acids and polypeptides:

| | Nucleic acid | Polypeptide |
|---|---|---|
| Plant source | SEQ ID NO: | SEQ ID NO: |
| S. lycopersicum_POZ#1 | 447 | 448 |
| G. hirsutum_TC133052#1 | 449 | 450 |
| P. trichocarpa_754573#1 | 451 | 452 |
| G. max_Glyma13g03460.1#1 | 453 | 454 |
| G. max_Glyma14g23960.1#1 | 455 | 456 |
| G. max_GM06MC01238_47161905@1229#1 | 457 | 458 |
| V. vinifera_GSVIVT00015398001#1 | 459 | 460 |
| G. raimondii_TC476#1 | 461 | 462 |
| B. napus_TC69247#1 | 463 | 464 |
| A. lyrata_921163#1 | 465 | 466 |
| A. thaliana_AT1G21780.1#1 | 467 | 468 |
| P. glauca_TA24854_3330#1 | 469 | 470 |
| P. sitchensis_TA16752_3332#1 | 471 | 472 |
| P. taeda_TA14818_3352#1 | 473 | 474 |
| C. tinctorius_TA1040_4222#1 | 475 | 476 |
| C. maculosa_TA4386_215693#1 | 477 | 478 |
| M. truncatula_AC140916_9.4#1 | 479 | 480 |
| G. max_Glyma06g12140.1#1 | 481 | 482 |
| G. hirsutum_TC152147#1 | 483 | 484 |
| P. trifoliata_TA6970_37690#1 | 485 | 486 |
| G. max_Glyma18g08140.1#1 | 487 | 488 |
| V. vinifera_GSVIVT00033478001#1 | 489 | 490 |
| G. max_Glyma08g44780.1#1 | 491 | 492 |
| Aquilegia_sp_TC27739#1 | 493 | 494 |
| S. lycopersicum_TC192422#1 | 495 | 496 |
| G. raimondii_TC4519#1 | 497 | 498 |
| G. hirsutum_TC149255#1 | 499 | 500 |
| L. saligna_TA3172_75948#1 | 501 | 502 |
| A. thaliana_AT1G55760.1#1 | 503 | 504 |
| A. lyrata_924095#1 | 505 | 506 |
| P. patens_130769#1 | 507 | 508 |
| M. truncatula_CT963107_29.4#1 | 509 | 510 |
| O. sativa_LOC_Os08g38700.1#1 | 511 | 512 |
| P. virgatum_TC35118#1 | 513 | 514 |
| S. bicolor_Sb07g028630.1#1 | 515 | 516 |
| M .truncatula_AC147712_28.4#1 | 517 | 518 |
| P. trichocarpa_708145#1 | 519 | 520 |
| Os_BTB POZ | 521 | 522 |
| T. aestivum_c54999055@16174#1 | 523 | 524 |
| T. aestivum_POZ#1 | 525 | 526 |
| T. aestivum_TC308191#1 | 527 | 528 |
| Z. mays_ZMO7MC18038_ | 529 | 530 |
| BFb0066O23@17991#1 | | |
| P. virgatum_TC11703#1 | 531 | 532 |
| S. bicolor_Sb07g000460.1#1 | 533 | 534 |
| Z. mays_ZM07MC35229_ | 535 | 536 |
| BFb0380M02@35122#1 | | |
| Aquilegia_sp_TC23244#1 | 537 | 538 |
| L. sativa_TC20555#1 | 539 | 540 |
| O. sativa_LOC_Os08g01320.1#1 | 541 | 542 |

[0463] Sequences have been tentatively assembled and publicly disclosed by research institutions, such as The Institute for Genomic Research (TIGR; beginning with TA). For instance, the Eukaryotic Gene Orthologs (EGO) database may be used to identify such related sequences, either by keyword search or by using the BLAST algorithm with the nucleic acid sequence or polypeptide sequence of interest. Special nucleic acid sequence databases have been created for particular organisms, e.g. for certain prokaryotic organisms, such as by the Joint Genome Institute. Furthermore, access to proprietary databases, has allowed the identification of novel nucleic acid and polypeptide sequences.

### Example 2

### Alignment of WIL Polypeptide Sequences

[0464] Alignment of polypeptide sequences can be performed using the ClustalW (1.83 or 2.0) algorithm of progressive alignment (Thompson et al. (1997) Nucleic Acids Res 25:4876-4882; Chenna et al. (2003). Nucleic Acids Res 31:3497-3500) with standard setting (slow alignment, similarity matrix: Gonnet (or Blosum 62 (if polypeptides are aligned)), gap opening penalty 10, gap extension penalty: 0.2). Minor manual editing can be done to further optimise the alignment.

[0465] A phylogenetic tree of WIL polypeptides can be constructed using a neighbour-joining clustering algorithm as provided in the AlignX programme from the Vector NTI (Invitrogen).

[0466] The alignment can be generated using MAFFT (Katoh and Toh (2008)—Briefings in Bioinformatics 9:286-298). A neighbour-joining tree can be calculated using Quick-Tree (Howe et al. (2002), Bioinformatics 18(11): 1546-7), 100 bootstrap repetitions. The circular phylogram can be drawn using Dendroscope (Huson et al. (2007), BMC Bioinformatics 8(1):460). Confidence for e.g. bootstrap repetitions can be indicated for major branching.

[0467] Alignment of SAWADEE-LIKE Polypeptide Sequences

[0468] Alignment of polypeptide sequences was performed using AlignX programme from the Vector NTI (Invitrogen) with standard settings. Minor manual editing was done to further optimise the alignment. The SAWADEE-like polypeptides are aligned in FIG. 3.

[0469] A phylogenetic tree of SAWADEE-like polypeptides may be constructed using a neighbour-joining clustering algorithm as provided in the AlignX program. The phylogenetic tree shown in FIG. 4 is taken from Mukherjee et al. (Mol. Biol. Evol. 26(12):2775-2794, 2009).

[0470] Alignment of POZ-like Polypeptide Sequences

[0471] Alignment of polypeptide sequences was performed using the ClustalW 2.0 algorithm of progressive alignment (Thompson et al. (1997) Nucleic Acids Res 25:4876-4882; Chenna et al. (2003). Nucleic Acids Res 31:3497-3500) with standard setting (slow alignment, similarity matrix: Gonnet, gap opening penalty 10, gap extension penalty: 0.2). Minor manual editing was done to further optimise the alignment. The POZ-like polypeptides of Class 2 and Class 3 (see FIG. 9) are aligned in FIG. 8.

[0472] A phylogenetic tree of POZ-like polypeptides (FIG. 9) was constructed by aligning POZ-like sequences using MAFFT (Katoh and Toh (2008)—Briefings in Bioinformatics 9:286-298). A neighbour-joining tree was calculated using Quick-Tree (Howe et al. (2002), Bioinformatics 18(11): 1546-7), 100 bootstrap repetitions. The dendrogram was drawn using Dendroscope (Huson et al. (2007), BMC Bioinformatics 8(1):460). Confidence levels for 100 bootstrap repetitions are indicated for major branchings.

### Example 3

### Calculation of Global Percentage Identity Between Polypeptide Sequences

[0473] Global percentages of similarity and identity between full length polypeptide sequences useful in performing the methods of the invention can be determined using one of the methods available in the art, the MatGAT (Matrix Global Alignment Tool) software (BMC Bioinformatics. 2003 4:29. MatGAT: an application that generates similarity/identity matrices using protein or DNA sequences. Campanella J J, Bitincka L, Smalley J; software hosted by Ledion Bitincka). MatGAT software generates similarity/identity matrices for DNA or protein sequences without needing pre-alignment of the data. The program performs a series of pair-wise alignments using the Myers and Miller global alignment algorithm (e.g. with a gap opening penalty of 12, and a gap extension penalty of 2), calculates similarity and identity using for example Blosum 62 (for polypeptides), and then places the results in a distance matrix.

[0474] In such a MatGAT table, sequence similarity can be shown in the bottom half of the dividing line and sequence identity can be shown in the top half of the diagonal dividing line. An example of parameters which can be used in the comparison are: Scoring matrix: Blosum62, First Gap: 12, Extending Gap: 2.

[0475] Results of the software analysis for SAWADEE-like polypeptide sequences are shown in FIG. 6 for the global similarity and identity over the full length of the polypeptide sequences. Sequence similarity is shown in the bottom half of the dividing line and sequence identity is shown in the top half of the diagonal dividing line. Parameters used in the comparison were: Scoring matrix: Blosum62, First Gap: 12, Extending Gap: 2.

[0476] A MATGAT table for local alignment of a specific domain, or data on % identity/similarity between specific domains may also be generated in the same way as for the global alignment.

[0477] Results of the analysis for POZ-like polypeptide sequences are shown in FIG. 10 for the global similarity and identity over the full length of the polypeptide sequences belonging to Class 3. Sequence similarity is shown in the bottom half of the dividing line and sequence identity is shown in the top half of the diagonal dividing line. Parameters used in the comparison were: Scoring matrix: Blosum62, First Gap: 12, Extending Gap: 2. The sequence identity (in %) between the POZ-like polypeptide sequences within Class 3 can be as low as 58% but is generally higher than 64% compared to SEQ ID NO: 2. Within classes 2 and 3, the sequence identity can be as low as 40%.

### Example 4

### Identification of Domains Comprised in Polypeptide Sequences Useful in Performing the Methods of the Invention

[0478] The Integrated Resource of Protein Families, Domains and Sites (InterPro) database is an integrated interface for the commonly used signature databases for text- and sequence-based searches. The InterPro database combines these databases, which use different methodologies and varying degrees of biological information about well-characterized proteins to derive protein signatures. Collaborating databases include SWISS-PROT, PROSITE, TrEMBL, PRINTS, ProDom and Pfam, Smart and TIGRFAMs. Pfam is a large collection of multiple sequence alignments and hidden Markov models covering many common protein domains and families. Pfam is hosted at the Sanger Institute server in the United Kingdom. Interpro is hosted at the European Bioinformatics Institute in the United Kingdom.

[0479] The results of the InterPro scan of the polypeptide sequence as represented by SEQ ID NO: 2 are presented in Table B1.

TABLE B1
InterPro scan results (major accession numbers)
of the polypeptide sequence as representedby SEQ ID NO: 2.

| | | | Amino acid coordinates |
|---|---|---|---|
| | | | on SEQ ID NO 2: e-value |
| | | Accession | [amino acid position |
| Method | Accession number | name | of the domain] |
| Superfamily | SSF54427 | NTF2-like | 2.2e-18 [12-136] |
| HMMPfam | PF07107 | WI12 | 4.7e-24 [60-177] |
| Gene3D | G3DSA: | No | 1.9e-06 [13-121] |
| | 3.10.450.50 | description | |

[0480] In an embodiment a WIL polypeptide comprises a conserved domain (or motif) with at least 70%, 71%, 72%, 73%, 74%, 75%, 76%, 77%, 78%, 79%, 80%, 81%, 82%, 83%, 84%, 85%, 86%, 87%, 88%, 89%, 90%, 91%, 92%, 93%, 94%, 95%, 96%, 97%, 98%, or 99% sequence identity to a conserved domain of amino acid coordinates 60 to 177 of SEQ ID NO:2.

[0481] The results of the InterPro scan (major accession numbers) of the polypeptide sequence as represented by SEQ ID NO: 325 are shown below.

[0482] The results of the InterPro scan (InterPro database, release 28.0) of the polypeptide sequence as represented by SEQ ID NO: 448 are presented in Table B2.

TABLE B2
InterPro scan results (major accession numbers) of the
polypeptide sequence as represented by SEQ ID NO: 448.

| Interpro ID | Domain ID | Domain name | Short Name | Location |
|---|---|---|---|---|
| IPR000210 | SM00225 | BTB/POZ-like | BTB | 1.8e-17 [163-261]T |
| | SMART | | | |
| | PS50097 | BTB/POZ-like | BTB | 16.383 [163-222]T |
| | PROFILE | | | |
| IPR011333 | G3DSA: 3.30.710.10 | BTB/POZ fold | No description | 2.9e-21 [147-257]T |
| | GENE3D | | | |
| | SSF54695 | BTB/POZ fold | POZ domain | 1.2e-23 [138-260]1 |
| | SUPERFAMILY | | | |
| IPR013069 | PF00651 | BTB/POZ | BTB | 6.2e-22 [155-259]T |
| | PFAM | | | |
| IPR013089 | PTHR23230 | KELCH-RELATED | Kelch related | 7.3e-58 [174-317]T |
| | PANTHER | PROTEIN | | |
| noIPR | PTHR23230: SF190 | unintegrated | uncharacterized | 7.3e-58 [174-317]T |
| unintegrated | PANTHER | | | |

[0483] In an embodiment a POZ-like polypeptide comprises a conserved domain (or motif) with at least 70%, 71%, 72%, 73%, 74%, 75%, 76%, 77%, 78%, 79%, 80%, 81%, 82%, 83%, 84%, 85%, 86%, 87%, 88%, 89%, 90%, 91%, 92%, 93%, 94%, 95%, 96%, 97%, 98%, or 99% sequence identity to a conserved domain from amino acid 155 to 259 in SEQ ID NO:448.

### Example 5

### Topology Prediction of the WIL Polypeptide or SAWADEE-LIKE Polypeptide or POZ-Like Polypeptide Sequences

[0484] TargetP 1.1 predicts the subcellular location of eukaryotic proteins. The location assignment is based on the predicted presence of any of the N-terminal pre-sequences: chloroplast transit peptide (cTP), mitochondrial targeting peptide (mTP) or secretory pathway signal peptide (SP). Scores on which the final prediction is based are not really probabilities, and they do not necessarily add to one. However, the location with the highest score is the most likely according to TargetP, and the relationship between the scores (the reliability class) may be an indication of how certain the prediction is. The reliability class (RC) ranges from 1 to 5, where 1 indicates the strongest prediction. TargetP is maintained at the server of the Technical University of Denmark.

[0485] For the sequences predicted to contain an N-terminal presequence a potential cleavage site can also be predicted.

[0486] A number of parameters can be selected, such as organism group (non-plant or plant), cutoff sets (none, predefined set of cutoffs, or user-specified set of cutoffs), and the calculation of prediction of cleavage sites (yes or no).

[0487] The results of TargetP 1.1 analysis of the polypeptide sequence as represented by SEQ ID NO: 2 are shown below. The “plant” organism group has been selected, no cutoffs defined, and the predicted length of the transit peptide requested. The subcellular localization of the polypeptide sequence as represented by SEQ ID NO: 2 is likely nuclear.

TargetP 1.1 Server—prediction results

Technical University of Denmark
### targetp v1.1 prediction results #########################
#########
Number of query sequences: 1
Cleavage site predictions included.
Using PLANT networks.

| Name | Len | cTP | mTP | SP | other | Loc | RC | TPlen |
|---|---|---|---|---|---|---|---|---|
| Sequence | 390 | 0.016 | 0.423 | 0.026 | 0.810 | — | 4 | — |
| cutoff | | 0.000 | 0.000 | 0.000 | 0.000 | | | |

2) PSORT --- Prediction of Protein Localization Sites

```
version 6.4(WWW)
MYSEQ  390 Residues
Species classification: 5
*** Reasoning Step: 1
Preliminary Calculation of ALOM (threshold: 0.5)
    count: 1
    Position of the most N-terminal TMS: 352 at i=1
MTOP: membrane topology (Hartmann et al.)
    I (middle): 359 Charge diffirence (C-N): 2.0
McG: Examining signal sequence (McGeoch)
    Length of UR: 9
    Peak Value of UR: −0.03
    Net Charge of CR: 1
    Discriminant Score: −14.97
GvH: Examining signal sequence (von Heijne)
    Signal Score (−3.5): −4.39
    Possible cleavage site: 49
>>> Seems to have no N-terminal signal seq.
Amino Acid Composition of Predicted Mature Form:
  calculated from 1
ALOM new cnt: 0 ** thrshld changed to −2
Cleavable signal was detected in ALOM?: 0B
ALOM: finding transmembrane regions (Klein et al.)
    count: 0 value: −0.80 threshold: −2.0
    PERIPHERAL Likelihood = −0.80
    modified ALOM score: −0.74
Gavel: Examining the boundary of mitochondrial targeting seq.
      motif at: 15
    FRFMQY
Discrimination of mitochondrial target seq.:
    negative (−4.55)
Hydrophobic moment analysis for chloroplast proteins
    Hmax: 11.17 at (52)
Disc.Score from Amino Acid Composition (chloroplast)
    score from the 3-11 region: −0.92
    score from the 1-31 region: 5.19
Chloroplast protein? Status: negative (−7.32)
*** Reasoning Step: 2
KDEL Count: 0
Checking apolar signal for intramitochondrial sorting
Mitochondrial matrix? Score: 0.10
Checking apolar signal for intrachloroplastic sorting
Howe: Checking the consensus for intrachloropl.sorting
Chloroplast thylakoid memb.? Score: 0.100
SKL motif (signal for peroxisomal protein):
    pos: −1(390), count: 0
Amino Acid Composition Tendency for Peroxisome: −2.50
Peroxisomal proteins? Status: negative
Amino acid composition tendency for vacuolar proteins
    Score: −5.67 Status: negative
Checking the amount of Basic Residues (nucleus)
Checking the 4 residue pattern for Nuclear Targeting
    Found: pos: 229 (3) RRRH
Checking the 7 residue pattern for Nuclear Targeting
Checking the Robbins & Dingwall consensus (nucleus)
Checking the RNA binding motif (nucleus or cytoplasm)
nuc modified. Score: 0.60
Nuclear Signal Status: notclr ( 0.30)
Checking CaaX motif . .
Checking N-myristoylation . .
Checking CaaX motif . .
Final Results
```

| | |
|---|---|
| nucleus | Certainty= 0.300 (Affirmative) < succ> |
| mitochondrial space | Certainty= 0.100 (Affirmative) < succ> |
| thylakoid membrane | Certainty= 0.100 (Affirmative) < succ> |
| ER (membrane) | Certainty= 0.000 (Not Clear) < succ> |

[0488] The results of TargetP 1.1 analysis of the polypeptide sequence as represented by SEQ ID NO: 448 are presented Table C. The “plant” organism group has been selected, no cutoffs defined, and the predicted length of the transit peptide requested. The subcellular localization of the polypeptide sequence as represented by SEQ ID NO: 448 may be the cytoplasm or nucleus, no transit peptide is predicted.

TABLE C
TargetP 1.1 analysis of the polypeptide sequence as represented by
SEQ ID NO: 448. Abbreviations: Len, Length; cTP, Chloroplastic
transit peptide; mTP, Mitochondrial transit peptide, SP, Secretory pathway
signal peptide, other, Other subcellular targeting, Loc, Predicted Location;
RC, Reliability class; TPlen, Predicted transit peptide length.

| Name | Len | cTP | mTP | SP | other | Loc | RC | TPlen |
|---|---|---|---|---|---|---|---|---|
| SEQ ID NO: 2 | 328 | 0.076 | 0.187 | 0.020 | 0.833 | — | 2 | — |
| cutoff | | 0.000 | 0.000 | 0.000 | 0.000 | | | |

[0489] Any other algorithms can be used to perform such analyses, including:
[0490] ChloroP 1.1 hosted on the server of the Technical University of Denmark;
[0491] Protein Prowler Subcellular Localisation Predictor version 1.2 hosted on the server of the Institute for Molecular Bioscience, University of Queensland, Brisbane, Australia;
[0492] PENCE Proteome Analyst PA-GOSUB 2.5 hosted on the server of the University of Alberta, Edmonton, Alberta, Canada;
[0493] TMHMM, hosted on the server of the Technical University of Denmark
[0494] PSORT (URL: psort.org)
[0495] PLOC (Park and Kanehisa, Bioinformatics, 19, 1656-1663, 2003).

### Example 6

### Cloning of the WIL Encoding Nucleic Acid Sequence

[0496] The nucleic acid sequence was amplified by PCR using as template a custom-made Oryza sativa seedlings cDNA library. PCR was performed using Hifi Taq DNA polymerase in standard conditions, using 200 ng of template in a 50 μl PCR mix. The primers used were prm15407 (SEQ ID NO: 322; sense): 5′-ggggacaagtttgtacaaaaaagcaggcttaaacaatggccatgg agttggaa-3′ and prm15408 (SEQ ID NO: 323; reverse, complementary): 5′-ggggaccac tttgtacaagaaagctgggtcacgtgtcagatggcgag-3′, which include the AttB sites for Gateway recombination. The amplified PCR fragment was purified also using standard methods. The first step of the Gateway procedure, the BP reaction, was then performed, during which the PCR fragment recombined in vivo with the pDONR201 plasmid to produce, according to the Gateway terminology, an “entry clone”, pWIL. Plasmid pDONR201 was purchased from Invitrogen, as part of the Gateway® technology.

[0497] Cloning of the SAWADEE-like Encoding Nucleic Acid Sequence

[0498] The nucleic acid sequence was amplified by PCR using as template a Populus trichocarpa library. PCR was performed using Hifi Taq DNA polymerase in standard conditions, using 200 ng of template in a 50 μl PCR mix. The primers used were prm14262 (SEQ ID NO: 445; sense, start codon in bold): 5′-ggggacaagtttgtacaaaaaagcaggcttaaacaatgggtcgtcctccc agt-3′ and prm14263 (SEQ ID NO: 446; reverse, complementary): 5′-ggggaccactttgtaca agaaagctgggttgaaacagagcagctatcaagg-3′, which include the AttB sites for Gateway recombination. The amplified PCR fragment was purified also using standard methods. The first step of the Gateway procedure, the BP reaction, was then performed, during which the PCR fragment recombined in vivo with the pDONR201 plasmid to produce, according to the Gateway terminology, an “entry clone”, pSAWADEE-like. Plasmid pDONR201 was purchased from Invitrogen, as part of the Gateway® technology.

[0499] Cloning of the POZ-Like Encoding Nucleic Acid Sequence

[0500] The nucleic acid sequence was amplified by PCR using as template a custom-made Lycopersicon esculentum seedlings cDNA library. PCR was performed using a commercially available proofreading Taq DNA polymerase in standard conditions, using 200 ng of template in a 50 μl PCR mix. The primers used were prm17159 (SEQ ID NO: 554; sense, start codon in bold): 5′-ggggacaagtttgtacaaaaaagcaggcttaaacaatgacaga cagcaaggtagag-3′ and prm17160 (SEQ ID NO: 555; reverse, complementary): 5′-ggggaccactttgtacaagaaagctgggtatacaactatggcaaaaacct-3′, which include the AttB sites for Gateway recombination. The amplified PCR fragment was purified also using standard methods. The first step of the Gateway procedure, the BP reaction, was then performed, during which the PCR fragment recombined in vivo with the pDONR201 plasmid to produce, according to the Gateway terminology, an “entry clone”, pPOZ-like. Plasmid pDONR201 was purchased from Invitrogen, as part of the Gateway® technology.

[0501] The entry clone comprising SEQ ID NO: 1 or SEQ ID NO: 324 or SEQ ID NO: 447 was then used in an LR reaction with a destination vector used for Oryza sativa transformation. This vector contained as functional elements within the T-DNA borders: a plant selectable marker; a screenable marker expression cassette; and a Gateway cassette intended for LR in vivo recombination with the nucleic acid sequence of interest already cloned in the entry clone. A rice GOS2 promoter (SEQ ID NO: 321 or SEQ ID NO: 443 or SEQ ID NO: 552) for constitutive expression was located upstream of this Gateway cassette.

[0502] After the LR recombination step, the resulting expression vector pGOS2::WIL (FIG. 2) or pGOS2::SAWADEE-like (FIG. 5) or pGOS2::POZ-like (FIG. 11) was transformed into Agrobacterium strain LBA4044 according to methods well known in the art.

### Example 7

### Functional Assay for the SAWADEE-Like Polypeptide

[0503] SAWADEE-like polypeptides may have DNA-binding activity in view of the presence of the homeodomain.

[0504] Functional Assay for the POZ-Like Polypeptide

[0505] Geyer et al. (Mol Cell. 12:783-90, 2003) and Gingerich et al. (J Biol Chem. 280:18810-21, 2005) describe two different approaches for determining protein-protein interactions between POZ-like proteins and their interacting partners.

### Example 8

### Plant Transformation

[0506] Rice Transformation

[0507] The Agrobacterium containing the expression vector was used to transform Oryza sativa plants. Mature dry seeds of the rice japonica cultivar Nipponbare were dehusked. Sterilization was carried out by incubating for one minute in 70% ethanol, followed by 30 minutes in 0.2% HgCl2, followed by a 6 times 15 minutes wash with sterile distilled water. The sterile seeds were then germinated on a medium containing 2,4-D (callus induction medium). After incubation in the dark for four weeks, embryogenic, scutellum-derived calli were excised and propagated on the same medium. After two weeks, the calli were multiplied or propagated by subculture on the same medium for another 2 weeks. Embryogenic callus pieces were sub-cultured on fresh medium 3 days before co-cultivation (to boost cell division activity).

[0508] Agrobacterium strain LBA4404 containing the expression vector was used for co-cultivation. Agrobacterium was inoculated on AB medium with the appropriate antibiotics and cultured for 3 days at 28° C. The bacteria were then collected and suspended in liquid co-cultivation medium to a density (OD600) of about 1. The suspension was then transferred to a Petri dish and the calli immersed in the suspension for 15 minutes. The callus tissues were then blotted dry on a filter paper and transferred to solidified, co-cultivation medium and incubated for 3 days in the dark at 25° C. Co-cultivated calli were grown on 2,4-D-containing medium for 4 weeks in the dark at 28° C. in the presence of a selection agent. During this period, rapidly growing resistant callus islands developed. After transfer of this material to a regeneration medium and incubation in the light, the embryogenic potential was released and shoots developed in the next four to five weeks. Shoots were excised from the calli and incubated for 2 to 3 weeks on an auxin-containing medium from which they were transferred to soil. Hardened shoots were grown under high humidity and short days in a greenhouse.

[0509] Approximately 35 independent T0 rice transformants were generated for one construct. The primary transformants were transferred from a tissue culture chamber to a greenhouse. After a quantitative PCR analysis to verify copy number of the T-DNA insert, only single copy transgenic plants that exhibit tolerance to the selection agent were kept for harvest of T1 seed. Seeds were then harvested three to five months after transplanting. The method yielded single locus transformants at a rate of over 50% (Aldemita and Hodges 1996, Chan et al. 1993, Hiei et al. 1994).

### Example 9

### Transformation of Other Crops

[0510] Corn Transformation

[0511] Transformation of maize (Zea mays) is performed with a modification of the method described by Ishida et al. (1996) Nature Biotech 14(6): 745-50. Transformation is genotype-dependent in corn and only specific genotypes are amenable to transformation and regeneration. The inbred line A188 (University of Minnesota) or hybrids with A188 as a parent are good sources of donor material for transformation, but other genotypes can be used successfully as well. Ears are harvested from corn plant approximately 11 days after pollination (DAP) when the length of the immature embryo is about 1 to 1.2 mm. Immature embryos are cocultivated with Agrobacterium tumefaciens containing the expression vector, and transgenic plants are recovered through organogenesis. Excised embryos are grown on callus induction medium, then maize regeneration medium, containing the selection agent (for example imidazolinone but various selection markers can be used). The Petri plates are incubated in the light at 25° C. for 2-3 weeks, or until shoots develop. The green shoots are transferred from each embryo to maize rooting medium and incubated at 25° C. for 2-3 weeks, until roots develop. The rooted shoots are transplanted to soil in the greenhouse. T1 seeds are produced from plants that exhibit tolerance to the selection agent and that contain a single copy of the T-DNA insert.

[0512] Wheat Transformation

[0513] Transformation of wheat is performed with the method described by Ishida et al. (1996) Nature Biotech 14(6): 745-50. The cultivar Bobwhite (available from CIMMYT, Mexico) is commonly used in transformation. Immature embryos are co-cultivated with Agrobacterium tumefaciens containing the expression vector, and transgenic plants are recovered through organogenesis. After incubation with Agrobacterium, the embryos are grown in vitro on callus induction medium, then regeneration medium, containing the selection agent (for example imidazolinone but various selection markers can be used). The Petri plates are incubated in the light at 25° C. for 2-3 weeks, or until shoots develop. The green shoots are transferred from each embryo to rooting medium and incubated at 25° C. for 2-3 weeks, until roots develop. The rooted shoots are transplanted to soil in the greenhouse. T1 seeds are produced from plants that exhibit tolerance to the selection agent and that contain a single copy of the T-DNA insert.

[0514] Soybean Transformation

[0515] Soybean is transformed according to a modification of the method described in the Texas A&M U.S. Pat. No. 5,164,310. Several commercial soybean varieties are amenable to transformation by this method. The cultivar Jack (available from the Illinois Seed foundation) is commonly used for transformation. Soybean seeds are sterilised for in vitro sowing. The hypocotyl, the radicle and one cotyledon are excised from seven-day old young seedlings. The epicotyl and the remaining cotyledon are further grown to develop axillary nodes. These axillary nodes are excised and incubated with Agrobacterium tumefaciens containing the expression vector. After the cocultivation treatment, the explants are washed and transferred to selection media. Regenerated shoots are excised and placed on a shoot elongation medium. Shoots no longer than 1 cm are placed on rooting medium until roots develop. The rooted shoots are transplanted to soil in the greenhouse. T1 seeds are produced from plants that exhibit tolerance to the selection agent and that contain a single copy of the T-DNA insert.

[0516] Rapeseed/Canola Transformation

[0517] Cotyledonary petioles and hypocotyls of 5-6 day old young seedling are used as explants for tissue culture and transformed according to Babic et al. (1998, Plant Cell Rep 17: 183-188). The commercial cultivar Westar (Agriculture Canada) is the standard variety used for transformation, but other varieties can also be used. Canola seeds are surface-sterilized for in vitro sowing. The cotyledon petiole explants with the cotyledon attached are excised from the in vitro seedlings, and inoculated with Agrobacterium (containing the expression vector) by dipping the cut end of the petiole explant into the bacterial suspension. The explants are then cultured for 2 days on MSBAP-3 medium containing 3 mg/l BAP, 3% sucrose, 0.7% Phytagar at 23° C., 16 hr light. After two days of co-cultivation with Agrobacterium, the petiole explants are transferred to MSBAP-3 medium containing 3 mg/l BAP, cefotaxime, carbenicillin, or timentin (300 mg/l) for 7 days, and then cultured on MSBAP-3 medium with cefotaxime, carbenicillin, or timentin and selection agent until shoot regeneration. When the shoots are 5-10 mm in length, they are cut and transferred to shoot elongation medium (MSBAP-0.5, containing 0.5 mg/l BAP). Shoots of about 2 cm in length are transferred to the rooting medium (MS0) for root induction. The rooted shoots are transplanted to soil in the greenhouse. T1 seeds are produced from plants that exhibit tolerance to the selection agent and that contain a single copy of the T-DNA insert.

[0518] Alfalfa Transformation

[0519] A regenerating clone of alfalfa (Medicago sativa) is transformed using the method of (McKersie et al., 1999 Plant Physiol 119: 839-847). Regeneration and transformation of alfalfa is genotype dependent and therefore a regenerating plant is required. Methods to obtain regenerating plants have been described. For example, these can be selected from the cultivar Rangelander (Agriculture Canada) or any other commercial alfalfa variety as described by Brown DCW and A Atanassov (1985. Plant Cell Tissue Organ Culture 4: 111-112). Alternatively, the RA3 variety (University of Wisconsin) has been selected for use in tissue culture (Walker et al., 1978 Am J Bot 65:654-659). Petiole explants are cocultivated with an overnight culture of Agrobacterium tumefaciens C58C1 pMP90 (McKersie et al., 1999 Plant Physiol 119: 839-847) or LBA4404 containing the expression vector. The explants are cocultivated for 3 d in the dark on SH induction medium containing 288 mg/L Pro, 53 mg/L thioproline, 4.35 g/L K2SO4, and 100 μm acetosyringinone. The explants are washed in half-strength Murashige-Skoog medium (Murashige and Skoog, 1962) and plated on the same SH induction medium without acetosyringinone but with a suitable selection agent and suitable antibiotic to inhibit Agrobacterium growth. After several weeks, somatic embryos are transferred to BOi2Y development medium containing no growth regulators, no antibiotics, and 50 g/L sucrose. Somatic embryos are subsequently germinated on half-strength Murashige-Skoog medium. Rooted seedlings were transplanted into pots and grown in a greenhouse. T1 seeds are produced from plants that exhibit tolerance to the selection agent and that contain a single copy of the T-DNA insert.

[0520] Cotton Transformation

[0521] Cotton is transformed using Agrobacterium tumefaciens according to the method described in U.S. Pat. No. 5,159,135. Cotton seeds are surface sterilised in 3% sodium hypochlorite solution during 20 minutes and washed in distilled water with 500 μg/ml cefotaxime. The seeds are then transferred to SH-medium with 50 μg/ml benomyl for germination. Hypocotyls of 4 to 6 days old seedlings are removed, cut into 0.5 cm pieces and are placed on 0.8% agar. An Agrobacterium suspension (approx. 108 cells per ml, diluted from an overnight culture transformed with the gene of interest and suitable selection markers) is used for inoculation of the hypocotyl explants. After 3 days at room temperature and lighting, the tissues are transferred to a solid medium (1.6 g/l Gelrite) with Murashige and Skoog salts with B5 vitamins (Gamborg et al., Exp. Cell Res. 50:151-158 (1968)), 0.1 mg/l 2,4-D, 0.1 mg/l 6-furfurylaminopurine and 750 μg/ml MgCL2, and with 50 to 100 μg/ml cefotaxime and 400-500 μg/ml carbenicillin to kill residual bacteria. Individual cell lines are isolated after two to three months (with subcultures every four to six weeks) and are further cultivated on selective medium for tissue amplification (30° C., 16 hr photoperiod). Transformed tissues are subsequently further cultivated on non-selective medium during 2 to 3 months to give rise to somatic embryos. Healthy looking embryos of at least 4 mm length are transferred to tubes with SH medium in fine vermiculite, supplemented with 0.1 mg/l indole acetic acid, 6 furfurylaminopurine and gibberellic acid. The embryos are cultivated at 30° C. with a photoperiod of 16 hrs, and plantlets at the 2 to 3 leaf stage are transferred to pots with vermiculite and nutrients. The plants are hardened and subsequently moved to the greenhouse for further cultivation.

[0522] Sugarbeet Transformation

[0523] Seeds of sugarbeet (Beta vulgaris L.) are sterilized in 70% ethanol for one minute followed by 20 min. shaking in 20% Hypochlorite bleach e.g. Clorox® regular bleach (commercially available from Clorox, 1221 Broadway, Oakland, Calif. 94612, USA). Seeds are rinsed with sterile water and air dried followed by plating onto germinating medium (Murashige and Skoog (MS) based medium (Murashige, T., and Skoog, 1962. Physiol. Plant, vol. 15, 473-497) including B5 vitamins (Gamborg et al.; Exp. Cell Res., vol. 50, 151-8.) supplemented with 10 g/l sucrose and 0.8% agar). Hypocotyl tissue is used essentially for the initiation of shoot cultures according to Hussey and Hepher (Hussey, G., and Hepher, A., 1978. Annals of Botany, 42, 477-9) and are maintained on MS based medium supplemented with 30 g/l sucrose plus 0.25 mg/l benzylamino purine and 0.75% agar, pH 5.8 at 23-25° C. with a 16-hour photoperiod. Agrobacterium tumefaciens strain carrying a binary plasmid harbouring a selectable marker gene, for example nptII, is used in transformation experiments. One day before transformation, a liquid LB culture including antibiotics is grown on a shaker (28° C., 150 rpm) until an optical density (O.D.) at 600 nm of ˜1 is reached. Overnight-grown bacterial cultures are centrifuged and resuspended in inoculation medium (O.D. ˜1) including Acetosyringone, pH 5.5. Shoot base tissue is cut into slices (1.0 cm×1.0 cm×2.0 mm approximately). Tissue is immersed for 30 s in liquid bacterial inoculation medium. Excess liquid is removed by filter paper blotting. Co-cultivation occurred for 24-72 hours on MS based medium incl. 30 g/l sucrose followed by a non-selective period including MS based medium, 30 g/l sucrose with 1 mg/l BAP to induce shoot development and cefotaxim for eliminating the Agrobacterium. After 3-10 days explants are transferred to similar selective medium harbouring for example kanamycin or G418 (50-100 mg/l genotype dependent). Tissues are transferred to fresh medium every 2-3 weeks to maintain selection pressure. The very rapid initiation of shoots (after 3-4 days) indicates regeneration of existing meristems rather than organogenesis of newly developed transgenic meristems. Small shoots are transferred after several rounds of subculture to root induction medium containing 5 mg/l NAA and kanamycin or G418. Additional steps are taken to reduce the potential of generating transformed plants that are chimeric (partially transgenic). Tissue samples from regenerated shoots are used for DNA analysis. Other transformation methods for sugarbeet are known in the art, for example those by Linsey & Gallois (Linsey, K., and Gallois, P., 1990. Journal of Experimental Botany; vol. 41, No. 226; 529-36) or the methods published in the international application published as WO9623891A.

[0524] Sugarcane Transformation

[0525] Spindles are isolated from 6-month-old field grown sugarcane plants (Arencibia et al., 1998. Transgenic Research, vol. 7, 213-22; Enriquez-Obregon et al., 1998. Planta, vol. 206, 20-27). Material is sterilized by immersion in a 20% Hypochlorite bleach e.g. Clorox® regular bleach (commercially available from Clorox, 1221 Broadway, Oakland, Calif. 94612, USA) for 20 minutes. Transverse sections around 0.5 cm are placed on the medium in the top-up direction. Plant material is cultivated for 4 weeks on MS (Murashige, T., and Skoog, 1962. Physiol. Plant, vol. 15, 473-497) based medium incl. B5 vitamins (Gamborg, O., et al., 1968. Exp. Cell Res., vol. 50, 151-8) supplemented with 20 g/l sucrose, 500 mg/l casein hydrolysate, 0.8% agar and 5 mg/l 2,4-D at 23° C. in the dark. Cultures are transferred after 4 weeks onto identical fresh medium. Agrobacterium tumefaciens strain carrying a binary plasmid harbouring a selectable marker gene, for example hpt, is used in transformation experiments. One day before transformation, a liquid LB culture including antibiotics is grown on a shaker (28° C., 150 rpm) until an optical density (O.D.) at 600 nm of ˜0.6 is reached. Overnight-grown bacterial cultures are centrifuged and resuspended in MS based inoculation medium (O.D. ˜0.4) including acetosyringone, pH 5.5. Sugarcane embryogenic callus pieces (2-4 mm) are isolated based on morphological characteristics as compact structure and yellow colour and dried for 20 min. in the flow hood followed by immersion in a liquid bacterial inoculation medium for 10-20 minutes. Excess liquid is removed by filter paper blotting. Co-cultivation occurred for 3-5 days in the dark on filter paper which is placed on top of MS based medium incl. B5 vitamins containing 1 mg/l 2,4-D. After co-cultivation calli are washed with sterile water followed by a non-selective cultivation period on similar medium containing 500 mg/l cefotaxime for eliminating remaining Agrobacterium cells. After 3-10 days explants are transferred to MS based selective medium incl. B5 vitamins containing 1 mg/l 2,4-D for another 3 weeks harbouring 25 mg/l of hygromycin (genotype dependent). All treatments are made at 23° C. under dark conditions. Resistant calli are further cultivated on medium lacking 2,4-D including 1 mg/l BA and 25 mg/l hygromycin under 16 h light photoperiod resulting in the development of shoot structures. Shoots are isolated and cultivated on selective rooting medium (MS based including, 20 g/l sucrose, 20 mg/l hygromycin and 500 mg/l cefotaxime). Tissue samples from regenerated shoots are used for DNA analysis. Other transformation methods for sugarcane are known in the art, for example from the in-ternational application published as WO2010/151634A and the granted European patent EP1831378.

### Example 10

### Phenotypic Evaluation Procedure

### 10.1 Evaluation Setup

[0526] Approximately 35 to about 90 independent T0 rice transformants were generated. The primary transformants were transferred from a tissue culture chamber to a greenhouse for growing and harvest of T1 seed. Events, of which the T1 events segregated 3:1 for presence/absence of the transgene, were retained. For each of these events, approximately 9 T1 seedlings containing the transgene (hetero- and homo-zygotes) and approximately 9 T1 seedlings lacking the transgene (nullizygotes) were selected by monitoring visual marker expression. The transgenic plants and the corresponding nullizygotes were grown side-by-side at random positions. Greenhouse conditions were of shorts days (12 hours light), 28° C. in the light and 22° C. in the dark, and a relative humidity of 70%. Plants grown under non-stress conditions are watered at regular intervals to ensure that water and nutrients are not limiting and to satisfy plant needs to complete growth and development, unless they were used in a stress screen.

[0527] From the stage of sowing until the stage of maturity the plants were passed several times through a digital imaging cabinet. At each time point digital images (2048×1536 pixels, 16 million colours) were taken of each plant from at least 6 different angles.

[0528] T1 events can be further evaluated in the T2 generation following the same evaluation procedure as for the T1 generation, e.g. with less events and/or with more individuals per event.

[0529] Drought Screen

[0530] Plants from T1 seeds or T2 seeds are grown in potting soil under normal conditions until they approached the heading stage. They are then transferred to a “dry” section where irrigation is withheld. Soil moisture or humidity probes are inserted in randomly chosen pots to monitor the soil water content (SWC). When SWC goes below certain thresholds, the plants are automatically re-watered continuously until a normal level is reached again. The plants are then re-transferred again to normal conditions. The rest of the cultivation (plant maturation, seed harvest) is the same as for plants not grown under abiotic stress conditions. Growth and yield parameters are recorded as detailed for growth under normal conditions.

[0531] Nitrogen Use Efficiency Screen

[0532] Rice plants from T1 seeds or from T2 seeds were grown in potting soil under normal conditions except for the nutrient solution. The pots were watered from transplantation to maturation with a specific nutrient solution containing reduced nitrogen (N) content, usually between 7 to 8 times less. The rest of the cultivation (plant maturation, seed harvest) was the same as for plants not grown under abiotic stress. Growth and yield parameters were recorded as detailed for growth under normal conditions.

[0533] Salt Stress Screen

[0534] Plants are grown on a substrate made of coco fibers and particles of baked clay argex (3 to 1 ratio). A normal nutrient solution is used during the first two weeks after transplanting the plantlets in the greenhouse. After the first two weeks, 25 mM of salt (NaCl) is added to the nutrient solution, until the plants are harvested. Seed-related parameters are then measured. Growth and yield parameters are recorded as detailed for growth under normal conditions.

[0535] 10.2 Statistical Analysis: F Test

[0536] A two factor ANOVA (analysis of variants) was used as a statistical model for the overall evaluation of plant phenotypic characteristics. An F test was carried out on all the parameters measured of all the plants of all the events transformed with the gene of the present invention. The F test was carried out to check for an effect of the gene over all the transformation events and to verify for an overall effect of the gene, also known as a global gene effect. The threshold for significance for a true global gene effect was set at a 5% probability level for the F test. A significant F test value points to a gene effect, meaning that it is not only the mere presence or position of the gene that is causing the differences in phenotype.

[0537] When two experiments with overlapping events are carried out, a combined analysis is performed. This is useful to check consistency of the effects over the two experiments, and if this is the case, to accumulate evidence from both experiments in order to increase confidence in the conclusion. The method uses a mixed-model approach that takes into account the multilevel structure of the data (i.e. experiment-event-segregants). P values are obtained by comparing likelihood ratio test to chi square distributions.

[0538] 10.3 Parameters Measured

[0539] From the stage of sowing until the stage of maturity the plants were passed several times through a digital imaging cabinet. At each time point digital images (2048×1536 pixels, 16 million colours) were taken of each plant from at least 6 different angles as described in WO2010/031780. These measurements were used to determine different parameters.

[0540] Biomass-Related Parameter Measurement

[0541] The plant aboveground area (or leafy biomass) was determined by counting the total number of pixels on the digital images from aboveground plant parts discriminated from the background. This value was averaged for the pictures taken on the same time point from the different angles and was converted to a physical surface value expressed in square mm by calibration. Experiments show that the aboveground plant area measured this way correlates with the biomass of plant parts above ground. The above ground area is the area measured at the time point at which the plant had reached its maximal leafy biomass. The early vigour is the plant (seedling) aboveground area three weeks post-germination.

[0542] Increase in root biomass is expressed as an increase in total root biomass (measured as maximum biomass of roots observed during the lifespan of a plant); or as an increase in the root/shoot index, measured as the ratio between root mass and shoot mass in the period of active growth of root and shoot. In other words, the root/shoot index is defined as the ratio of the rapidity of root growth to the rapidity of shoot growth in the period of active growth of root and shoot. Root biomass can be determined using a method as described in WO 2006/029987.

[0543] Parameters Related to Development Time

[0544] The early vigour is the plant aboveground area three weeks post-germination. Early vigour was determined by counting the total number of pixels from aboveground plant parts discriminated from the background. This value was averaged for the pictures taken on the same time point from different angles and was converted to a physical surface value expressed in square mm by calibration.

[0545] AreaEmer is an indication of quick early development when this value is decreased compared to control plants. It is the ratio (expressed in %) between the time a plant needs to make 30% of the final biomass and the time needs to make 90% of its final biomass.

[0546] The “time to flower” or “flowering time” of the plant can be determined using the method as described in WO 2007/093444.

[0547] Seed-Related Parameter Measurements

[0548] The mature primary panicles were harvested, counted, bagged, barcode-labelled and then dried for three days in an oven at 37° C. The panicles were then threshed and all the seeds were collected and counted. The seeds are usually covered by a dry outer covering, the husk. The filled husks (herein also named filled florets) were separated from the empty ones using an air-blowing device. The empty husks were discarded and the remaining fraction was counted again. The filled husks were weighed on an analytical balance.

[0549] The total number of seeds was determined by counting the number of filled husks that remained after the separation step. The total seed weight was measured by weighing all filled husks harvested from a plant.

[0550] The total number of florets per plant was determined by counting the number of husks (whether filled or not) harvested from a plant.

[0551] Thousand Kernel Weight (TKW) is extrapolated from the number of seeds counted and their total weight.

[0552] The Harvest Index (HI) in the present invention is defined as the ratio between the total seed weight and the above ground area (mm²), multiplied by a factor 106.

[0553] The total number of flowers per panicle as defined in the present invention is the ratio between the total number of flowers and the number of mature primary panicles.

[0554] The “seed fill rate” or “seed filling rate” as defined in the present invention is the proportion (expressed as a %) of the number of filled florets (i.e. florets containing seeds) over the total number of florets. In other words, the seed filling rate is the percentage of florets that are filled with seed.

### Example 11

### Results of the Phenotypic Evaluation of the Transgenic Plants

[0555] WIL Polypeptides

[0556] The results of the evaluation of transgenic rice plants in the T1 generation and expressing a nucleic acid encoding the WIL polypeptide of SEQ ID NO: 2 under stress conditions are presented below in Table D1. When grown under nitrogen deficiency stress conditions, an increase of at least 5% was observed for total seed weight, fill rate and harvest index (Table D1).

TABLE D1
Data summary for transgenic rice plants; for each
parameter, the overall percent increase is
shown, for each parameter the p-value is <0.05.

| Parameter | Overall increase |
|---|---|
| totalwgseeds | 14.1 |
| fillrate | 13.7 |
| harvestindex | 9.2 |

[0557] SAWADEE-Like Polypeptides

[0558] Results of the phenotypic evaluation of the transgenic plants grown under non-stress conditions expressing a SAWADEE-like nucleic acid according to SEQ ID NO: 324 under the control of a GOS2 promoter

| Parameter | % Overall |
|---|---|
| Root Shoot Index | −6.2 |
| Fill rate | 5.0 |
| Number flowers per panicle | 7.4 |
| Area Emergence | 45.0 |

[0559] % overall shown in the table above is for a parameter giving p<0.05 in the F-test of and at least a 5% difference between the transgenic events and corresponding nullizygotes and in the case of TKW at least a 5% difference between the transgenic events and corresponding nullizygotes.

[0560] In addition to the parameters indicated in the table above, some events also showed an increase in aboveground biomass, emergence vigour, early flowering, total weight of seeds, fill rate TKW, greenness before flowering, number of filled seeds, number of flowers per panicle and plant height, compared to corresponding nullizygotes.

[0561] Results of the phenotypic evaluation of the transgenic plants grown under low nitrogen conditions expressing a SAWADEE-like nucleic acid according to SEQ ID NO: 324 under the control of a GOS2 promoter

| Parameter | % Overall |
|---|---|
| Area Max (aboveground biomass) | 7.7 |
| Root Shoot Index | −11.6 |
| Total weight seeds | 15.8 |
| Fill rate | 7.1 |
| Harvest index | 7.0 |
| TKW | 5.5 |
| Number filled seed | 9.3 |
| Flowers per panicle | 10.9 |
| Height Max | 6.1 |
| Gravity Y Max | 8.2 |
| Area Emergence | 10.3 |

[0562] % overall shown in the table above is for a parameter giving p<0.05 in the F-test of and at least a 5% difference between the transgenic events and corresponding nullizygotes and in the case of TKW at least a 5% difference between the transgenic events and corresponding nullizygotes.

[0563] Gravity Y Max is a robust indication of the height of the plant (gravity centre of the leafy biomass) avoiding the influence of a single erect leaf.

[0564] In addition to the parameters indicated in the table above, some events also showed an increase in aboveground biomass, emergence vigour and early flowering compared to corresponding nullizygotes.

[0565] POZ-Like Polypeptide

[0566] Transgenic rice plants expressing the POZ-like nucleic acid of SEQ ID NO: 447 under control of the rice GOS2 promoter and grown under conditions of nitrogen deficiency showed increased yield as presented in Table D2.

TABLE D2
Data summary for transgenic rice plants; for each
parameter, the overall percent increase is shown for
the confirmation (T2 generation), for each parameter
the p-value is <0.05 or p < 0.1 where it is marked *.

| Parameter | Overall |
|---|---|
| AreaMax | 6.6 |
| firstpan | 20.4 |
| RootMax | 2.7* |
| nrtotalseed | 7.3* |

1-66. (canceled)

67. A method for enhancing yield-related traits in a plant relative to a control plant, comprising modulating expression in a plant of a nucleic acid encoding:
(a) a SAWADEE-like polypeptide, wherein said SAWADEE-like polypeptide comprises (i) a homeodomain, (ii) a SAWADEE domain, and (iii) a nuclear localisation signal (NLS);
(b) a POZ-like polypeptide, wherein said POZ-like polypeptide comprises a PFam PF00651 domain; or
(c) a WI12-like (WIL) polypeptide, wherein said WIL polypeptide comprises one or more of the following motifs:
(i) Motif 1:
(SEQ ID NO: 317)
IT[RQ][VL]REYFNTS[VL]TV[RT][DR][VLF],
(ii) Motif 2:
(SEQ ID NO: 318)
[PR][RS][AIV][YS]W[VI]H[AV]W[AT]V[ET][GD]G[RGI],
(iii) Motif 3:
(SEQ ID NO: 319)
[DS][DN][DR][DVA][DG][RK]S[VL]PGLVLA[IL].

68. The method of claim 67,
(a) wherein for the SAWADEE-like polypeptide, said homeodomain comprises the following sequence:
(SEQ ID NO: 438)
NGGPSFRFMQYEVTEMDAILQEHHNMMPAREVLVSLAEKFSES
SERKGKIQVQMKQVWNWFQNRRYAIRAKS,
or a sequence having at least 60%, 61%, 62%, 63%, 64%, 65%, 66%, 67%, 68%, 69%, 70%, 71%, 72%, 73%, 74%, 75%, 76%, 77%, 78%, 79%, 80%, 81%, 82%, 83%, 84%, 85%, 86%, 87%, 88%, 89%, 90%, 91%, 92%, 93%, 94%, 95%, 96%, 97%, 98%, or 99% sequence identity to Domain i or a sequence falling under Inter Pro accession number IPRO01356;
(b) wherein said POZ-like polypeptide comprises one or more of the following motifs:
(i) Motif 13:
(SEQ ID NO: 543)
AH[RK]A[VI]L[AS]A[RTS]SPVF[REH]SMF[SL]H[DN]L[KR]
EKE[SL]S[IT][IV][NDH]I[SE]DMS[TL]E[SA]C[QTM]A[LF]
L[SN]Y[LI]YG[NT]I,
(ii) Motif 14:
(SEQ ID NO: 544)
[DE][LF][WL]KHRLALL[GR]AA[DN]KYDI[VG]DLK[END]AC
[EH]ESLLEDI[DN][ST][KG]NVLERLQEAWLYQL,
(iii) Motif 15:
(SEQ ID NO: 545)
[KR]VET[ILT]SRLAQWRI[DE]N[LF][GT][PAS][SC][TS]Y
[RK][KR]SDPFK[IV]G[IL]WNW[HY]LS[VI]E[KR]N;
or
(c) wherein said nucleic acid encoding a WIL polypeptide comprises an Interpro accession IPR009798 WI12 domain, corresponding to PFAM accession number PF07107 WI12 domain.

69. The method of claim 67, wherein said SAWADEE domain comprises each of Motifs 4, 5 and 6 as follows and comprises the conserved cysteine and histidine residues indicated in bold and underlined or as indicated in the alignment of FIG. 3,
Motif 4
[PV]GDL[IV]LCFQEGK[ED]QALY[FY]DAHVL[DE][IA]QR[RK][RL]HD[VI]RGCR C[RI]F[LV]VRYDHDQSEE (SEQ ID NO: 439), or a motif having at least 60%, 61%, 62%, 63%, 64%, 65%, 66%, 67%, 68%, 69%, 70%, 71%, 72%, 73%, 74%, 75%, 76%, 77%, 78%, 79%, 80%, 81%, 82%, 83%, 84%, 85%, 86%, 87%, 88%, 89%, 90%, 91%, 92%, 93%, 94%, 95%, 96%, 97%, 98%, or 99% sequence identity to the Motif 4;
Motif 5
EV[RL]VRF[AS]GFG[AP]EEDEW[VI]NV[RK][KR] (SEQ ID NO: 440), or a motif having at least 60%, 61%, 62%, 63%, 64%, 65%, 66%, 67%, 68%, 69%, 70%, 71%, 72%, 73%, 74%, 75%, 76%, 77%, 78%, 79%, 80%, 81%, 82%, 83%, 84%, 85%, 86%, 87%, 88%, 89%, 90%, 91%, 92%, 93%, 94%, 95%, 96%, 97%, 98%, or 99% sequence identity to the Motif 5; and
Motif 6
[RK]DGAWYDVA[AST]FL[ST][HY]R (SEQ ID NO: 441), or a motif having at least 60%, 61%, 62%, 63%, 64%, 65%, 66%, 67%, 68%, 69%, 70%, 71%, 72%, 73%, 74%, 75%, 76%, 77%, 78%, 79%, 80%, 81%, 82%, 83%, 84%, 85%, 86%, 87%, 88%, 89%, 90%, 91%, 92%, 93%, 94%, 95%, 96%, 97%, 98%, or 99% sequence identity to the Motif 6.

70. The method of claim 67, wherein said modulated expression is effected by introducing and expressing in a plant a nucleic acid encoding said SAWADEE-like polypeptide, said POZ-like polypeptide, or said WIL polypeptide.

71. The method of claim 67, wherein said enhanced yield-related traits comprise increased yield relative to a control plant, and preferably comprise increased biomass and/or increased seed yield relative to a control plant.

72. The method of claim 67, wherein said enhanced yield-related traits are obtained under non-stress conditions.

73. The method of claim 67, wherein said enhanced yield-related traits are obtained under conditions of drought stress, salt stress or nitrogen deficiency.

74. The method of claim 67,
(a) wherein said nucleic acid encoding a SAWADEE-like polypeptide is of plant origin, from a dicotyledonous plant, from the family Brassicaceae, from the Populus genus, or from Populus trichocarpa;
(b) wherein said nucleic acid encoding a POZ-like polypeptide is of plant origin, from a dicotyledonous plant, from the family Solanaceae, from the genus Lycopersicon, or from Lycopersicon esculentum;
or
(c) wherein said nucleic acid encoding a WIL is of plant origin, from a monocotyledonous plant, from the family Poaceae, from the genus Oryza, or from Oryza sativa.

75. The method of claim 67,
(a) wherein said nucleic acid encoding a SAWADEE-like polypeptide encodes any one of the polypeptides listed in Table A2 or is a portion of such a nucleic acid, or a nucleic acid capable of hybridising with such a nucleic acid, and/or wherein said nucleic acid sequence encodes an orthologue or paralogue of any of the polypeptides given in Table A2;
(b) wherein said nucleic acid encoding a POZ-like encodes any one of the polypeptides listed in Table A3 or is a portion of such a nucleic acid, or a nucleic acid capable of hybridising with such a nucleic acid, and/or wherein said nucleic acid sequence encodes an orthologue or paralogue of any of the polypeptides given in Table A3;
or
(c) wherein said nucleic acid encoding a WIL encodes any one of the polypeptides listed in Table A1 or is a portion of such a nucleic acid, or a nucleic acid capable of hybridising with such a nucleic acid, and/or wherein said nucleic acid sequence encodes an orthologue or paralogue of any of the polypeptides given in Table A1.

76. The method of claim 67, wherein said nucleic acid encodes a SAWADEE-like polypeptide comprising the amino acid sequence of SEQ ID NO: 325, a POZ-like polypeptide comprising the amino acid sequence of SEQ ID NO: 448, or a WIL polypeptide comprising the amino acid sequence of SEQ ID NO: 2.

77. The method of claim 67, wherein said nucleic acid is operably linked to a constitutive promoter, a medium strength constitutive promoter, a plant promoter, a GOS2 promoter, or a GOS2 promoter from rice.

78. A plant, plant part, including seeds, or plant cell, obtained by the method of claim 67, wherein said plant, plant part or plant cell comprises a recombinant nucleic acid encoding said SAWADEE-like polypeptide, a recombinant nucleic acid encoding said POZ-like polypeptide, or a recombinant nucleic acid encoding said WIL polypeptide.

79. A construct comprising:
(i) a nucleic acid encoding a SAWADEE-like polypeptide, a POZ-like polypeptide, or a WIL polypeptide as defined in claim 67;
(ii) one or more control sequences capable of driving expression of the nucleic acid of (i); and optionally
(iii) a transcription termination sequence.

80. The construct of claim 79, wherein one of said control sequences is a constitutive promoter, a medium strength constitutive promoter, a plant promoter, a GOS2 promoter, or a GOS2 promoter from rice.

81. A method for making a plant having enhanced yield-related traits relative to a control plant, preferably increased yield relative to a control plant or increased seed yield and/or increased biomass relative to a control plant, comprising utilizing the construct of claim 79.

82. A plant, plant part or plant cell transformed with the construct of claim 79.

83. A method for the production of a transgenic plant having enhanced yield-related traits relative to a control plant, preferably increased yield relative to a control plant or increased seed yield and/or increased biomass relative to a control plant, comprising:
(i) introducing and expressing in a plant cell or plant a nucleic acid encoding the SAWADEE-like polypeptide, the POZ-like polypeptide, or the WIL polypeptide as defined in claim 67; and
(ii) cultivating said plant cell or plant under conditions promoting plant growth and development.

84. A transgenic plant having enhanced yield-related traits relative to a control plant, preferably increased yield relative to a control plant or increased seed yield and/or increased biomass relative to a control plant, resulting from modulated expression of a nucleic acid encoding the SAWADEE-like polypeptide, the POZ-like polypeptide, or the WIL polypeptide as defined in claim 67, or a transgenic plant cell derived from said transgenic plant.

85. The transgenic plant of claim 84, or a transgenic plant cell derived therefrom, wherein said plant is a crop plant, such as beet, sugarbeet or alfalfa; or a monocotyledonous plant such as sugarcane; or a cereal, such as rice, maize, wheat, barley, millet, rye, triticale, sorghum, emmer, spelt, secale, einkorn, teff, milo or oats.

86. Harvestable parts of the transgenic plant of claim 85, wherein said harvestable parts are preferably shoot biomass and/or seeds.

87. Products derived from the transgenic plant of claim 85 and/or from harvestable parts of said plant.

88. An isolated nucleic acid molecule comprising a nucleotide sequence selected from the group consisting of:
(i) a nucleotide sequence of SEQ ID NO: 457, SEQ ID NO: 523, SEQ ID NO: 529, or SEQ ID NO: 535;
(ii) the complement of the nucleotide sequence of SEQ ID NO: 457, SEQ ID NO: 523, SEQ ID NO: 529, or SEQ ID NO: 535;
(iii) a nucleotide sequence encoding a POZ-like polypeptide having at least 50%, 51%, 52%, 53%, 54%, 55%, 56%, 57%, 58%, 59%, 60%, 61%, 62%, 63%, 64%, 65%, 66%, 67%, 68%, 69%, 70%, 71%, 72%, 73%, 74%, 75%, 76%, 77%, 78%, 79%, 80%, 81%, 82%, 83%, 84%, 85%, 86%, 87%, 88%, 89%, 90%, 91%, 92%, 93%, 94%, 95%, 96%, 97%, 98%, or 99% sequence identity to the amino acid sequence of SEQ ID NO: 458, SEQ ID NO: 524, SEQ ID NO: 530, or SEQ ID NO: 536, and additionally or alternatively comprising one or more motifs having at least 50%, 55%, 60%, 65%, 70%, 75%, 80%, 85%, 90%, 95%, 96%, 97%, 98%, 99% or more sequence identity to one or more of the motifs given in SEQ ID NO: 543 to SEQ ID NO: 551, and further preferably conferring enhanced yield-related traits in a plant relative to a control plant; and
(iv) a nucleotide sequence which hybridizes with any of the nucleotide sequences of (i) to (iii) under high stringency hybridization conditions and preferably confers enhanced yield-related traits in a plant relative to a control plant.

89. An isolated polypeptide comprising an amino acid sequence selected from the group consisting of:
(i) the amino acid sequence of SEQ ID NO: 458, SEQ ID NO: 524, SEQ ID NO: 530, or SEQ ID NO: 536;
(ii) an amino acid sequence having at least 50%, 51%, 52%, 53%, 54%, 55%, 56%, 57%, 58%, 59%, 60%, 61%, 62%, 63%, 64%, 65%, 66%, 67%, 68%, 69%, 70%, 71%, 72%, 73%, 74%, 75%, 76%, 77%, 78%, 79%, 80%, 81%, 82%, 83%, 84%, 85%, 86%, 87%, 88%, 89%, 90%, 91%, 92%, 93%, 94%, 95%, 96%, 97%, 98%, or 99% sequence identity to the amino acid sequence of SEQ ID NO: 458, SEQ ID NO: 524, SEQ ID NO: 530, or SEQ ID NO: 536, and additionally or alternatively comprising one or more motifs having at least 50%, 55%, 60%, 65%, 70%, 75%, 80%, 85%, 90%, 95%, 96%, 97%, 98%, 99% or more sequence identity to one or more of the motifs given in SEQ ID NO: 543 to SEQ ID NO: 551, and further preferably conferring enhanced yield-related traits in a plant relative to a control plant; and
(iii) derivatives of any of the amino acid sequences given in (i) or (ii) above.

The application's sequence listing, which the Patent Office published only in electronic form, follows.

SEQUENCE LISTING (555 sequences)

SEQ ID NO: 1 - DNA, 855 bp, Oryza sativa
cagtcacgacgttgtaaaacgacgaccagtcttaagctcgggccccaaataatgattttattttgactgatagtgacctgtttcgttgcacaaattgatgagcaatgcttttttataatgccaactttgtacaaaaaagcaggcttaaacaatggccatggagttggaagcggaggaggaggcgatgatgacggcgagggagaacgagaggctggtggagtcgctgtacgcggcggtggcggcgggggacggggcggcggcgtcggccgtgctggcgggcgacgtggactggtggttccacgggccgaggcggtgcgagcacatgcggcggcgcctgaccggggaggccgaggctgcgtcggcgtcgtccttcgtgttcgtgccgcggcaggtggcggcggtggggcgcggcggcgggtgggtggtggcggaagggtgggaggggccacgcgcgtactgggtccacgcctgggccgtcgagggcggccgcatcacccgcctccgcgagtacttcaacacctccgtcaccgtccgggacgtcggcggcggcggccactgccggccgcagctcgacggaggaggagttcgccggcgcgccgccgtgtgctggcagagccaacgtgggcgcggcggcggcgacgacgacgacgacaggtcgctgcctggcctcgtgctcgccatctacacgtgacccagctttcttgtacaaagttggcattataagaaagcattgcttatcaatttgttgcaacgaacaggtcactatcagtcaaaataaaatcattatttgccatccagctgatatcccctatagtgagtcgtattacatggtcatagctgtttcctggcagctct

SEQ ID NO: 2 - protein, 179 aa, Oryza sativa
MAMELEAEEEAMMTARENERLVESLYAAVAAGDGAAASAVLAGDVDWWFHGPRRCEHMRRRLTGEAEAASASSFVFVPRQVAAVGRGGGWVVAEGWEGPRAYWVHAWAVEGGRITRLREYFNTSVTVRDVGGGGHCRPQLDGGGVRRRAAVCWQSQRGRGGGDDDDDRSLPGLVLAIYT

SEQ ID NO: 3 - DNA, 682 bp, Adonis aestivalis
aagagcaacaacagcttgtggtagagaagctttatgaagcgttgagaggcggagacgtagataccgtgcaaaggttactggctgccgacatcgaatggtggtatcacggcccgccttgccatcagcaacatctcatgcaactgctgaccggcggtgctgatcttcccaaaaccaaaagcaaattgtctttcgctcctagccgtatcactgctatcggtttgaacacggtgttagctgaaggctgcgaaaagaatccggcggtgtcttgggtgcatgcttggaccgttaacgatgatggtgtaatcactcagatcagagagtatattaacacacagctcacggttgcacgttttgacaagaagaagaagaaactcttatgttcgtcttccaaatcatcttcttccattttttgggaaagtaggctctctggaaagtcggtgcctggtcttgtcttggcaatttaataataattggatatcaaactaagcctattaaggcgtttgagaagatgtagtagtctcaagttgtttgtgttctaaggtttggggggtttgtgttctctggggttggatagtttgtatttgttagtgatgatcaccacgttgaattggtggtcagtttcttttcatgtttatgtttgtagtcttcctgacaattatgaaacattgttctctttcctttt

SEQ ID NO: 4 - protein, 109 aa, Adonis aestivalis
MQLLTGGADLPKTKSKLSFAPSRITAIGLNTVLAEGCEKNPAVSWVHAWTVNDDGVITQIREYINTQLTVARFDKKKKKLLCSSSKSSSSIFWESRLSGKSVPGLVLAI

SEQ ID NO: 5 - DNA, 467 bp, Arabidopsis lyrata
gacgtggttctgaaactgtatgaagccttgagatctcgcgacgttaaatctgtgcaccagatcttaaccccagatctggagtattggttccacggccctccgccgcaccagtttttgatgcgcgtactcaccggaggagtctctccgtcttcttcctcgttcgaattcgtacctctctccgtcgtttcgttcggatctaccgtaatcgcagaaggctgcgacgccgcgacctcgatttcttggatccacgcttggaccgtagcgaatgggataatcacacaggtgagggagtactctaacacttctctcaccgtcacgcggatcggtaacgttgttgctggacgacgctccgctgagattgcgccgtcgcattgcccctccgtgtgggaaagccaattctcgggtcgggcaggtaaatccgtacccggtttggttctggcgatttgaaagaatttggtaaagtaagt

SEQ ID NO: 6 - protein, 109 aa, Arabidopsis lyrata
MRVLTGGVSPSSSSFEFVPLSVVSFGSTVIAEGCDAATSISWIHAWTVANGIITQVREYSNTSLTVTRIGNVVAGRRSAEIAPSHCPSVWESQFSGRAGKSVPGLVLAI

SEQ ID NO: 7 - DNA, 623 bp, Antirrhinum majus
ccaattcactttggtttgttactgctctcattaatcaacaactggcgatatctgagtcaactctggaggaggaatctttattcaacaaaggggtggtgaccgccctgtatgacgccttgaacacccgccacgtggcagctgtccagaagattctagcccccgacctcgagtggtggttccatggtccgccgacacaccagttcttgatgcgcctgctcacaggagaagaacaggactctgaatatttcaaattcgtaccccacagcatctccgccttcggatccaccgttctcgcagagggattcgaccaatcgctgtcgatcgcctgggttcacgcctggaccgtcacggatgggataattacccaggtcagagagtacctgaacacgtcacttactgtcacgcgtgttggaaacgccgaccaatcggatcgtagcattctgccacgtaattgtccctcgctttgggagagcagtcttccgggtcgggtcggaaagtccgtgcccggtttggtcctcgcgctctgatttgggtttttaagggttttgaaatatcgctctataattaatataatagtaattaagaataaagagtgataaggattgtgtgtgtgtgtgtgtgtg

SEQ ID NO: 8 - protein, 106 aa, Antirrhinum majus
MRLLTGEEQDSEYFKFVPHSISAFGSTVLAEGFDQSLSIAWVHAWTVTDGIITQVREYLNTSLTVTRVGNADQSDRSILPRNCPSLWESSLPGRVGKSVPGLVLAL

SEQ ID NO: 9 - DNA, 918 bp, Arabidopsis thaliana
tcaaaatccttcaagaatcgcttcatcttcttcttcttcaacaaatcgagtcctttttctgataactcatttcgatttcagaaactcgccaagaactggatactctggcggaatcagagattaagaaccgagacgtggttctgaaactgtatgaagccctgagatctcgcgacgtcaaatctgtgcaccagatcttaaccccagatctggagtattggttccacggtcctccgccgcaccagtttttgatgcgcgtactcaccggaggtgtctctccgtcttcttcctccttcgaattcgtacctctctccgtcgtttccttcggatctaccgtaatcgcggaaggctgcgacgccgcgacatcgatttcttggatccacgcttggactgtagcgaatgggataatcacacaggtgagggagtactctaacacttctctcaccgtcacacggatcggtaacgttgttgctggacgacgctccgctgagattgcgcctccgtcgcattgttcctccgtgtgggaaagccaattctcgggtcgggctggtaaacccgtacccggtttggttctggcgatttgaaagagtttggtaaagtaagtaacagccacgtcaggagaataactaaataaaggctgcttacgtgtctgtgtgtggttggtttgtttgttgtatgggttaaaaaggattttgttgctgttttaaacgcggtgtgggcttctggggctacggtcgcgtttggctgtcgctagtttttttttttttttaagttgtttgtctgaaaattcgtgtgggtttgtgttttttagtgggagcaagtatggggaaacccaaatcgacttgttgtcccgttgcgtttgatgtaacgtttgcttatgttataattgaaataaaaaagtgcttttgggatcttttgatg

SEQ ID NO: 10 - protein, 110 aa, Arabidopsis thaliana
MRVLTGGVSPSSSSFEFVPLSVVSFGSTVIAEGCDAATSISWIHAWTVANGIITQVREYSNTSLTVTRIGNVVAGRRSAEIAPPSHCSSVWESQFSGRAGKPVPGLVLAI

SEQ ID NO: 11 - DNA, 806 bp, Brassica napus
aggggaataagcttatctacgttgttcgtctcttaattaatccaattttttaatcccgaaaactctttcaagaactggatactctggcggattctgagaccaagaaccgagacgtggttctgaagctgtatgacgccctgagatctcgcgacgtcgactccgttcaccggaccctaaccccggacctcgactactggttccacggccctccgccgcaccagtttttgatgcgcacgctcaccggcgtctctccgccgtttgaattctcgcctctctccgtcgtctccttcggatccaccgtcattgccgagggctgcgacgccgccagctccgtctcctggatccacgcctggaccgtgtcgcatggggtaatcactcaggtgagggagtactcgaacacctcgctcacggttacgcggatcggtagcgtcgtctccgggcgctctgcggagatcagggcgtcgcattgcccctccgtgtgggaaagcaaattctcgggtcgggctggaaaatccgtcccgggtctggttcttgcgatttgaggatttggtaaaggttattgctgcagccacgtcagattaataactaaataaaggctgttgcttacgtgtcggtgtgtggttggtttgttgttttatgggttgaaaggatttgtgcggttgagacgcggtgtgggctaacgcttaaaggtcgcgttttggtcgtcgcttttcttctcttgtttttttttttttttttattattagctttaagttcgtgcctttgtttggggttttagtgcgtacaagcatgaggaaacccatatt

SEQ ID NO: 12 - protein, 104 aa, Brassica napus
MRTLTGVSPPFEFSPLSVVSFGSTVIAEGCDAASSVSWIHAWTVSHGVITQVREYSNTSLTVTRIGSVVSGRSAEIRASHCPSVWESKFSGRAGKSVPGLVLAI

SEQ ID NO: 13 - DNA, 798 bp, Brassica napus
cccacgcgtccggttctcttcctcttattgtcctaatccaaaacccaaactcgcgcaagaactggatactctggcggattcagagacaaagaaccgagacgtggttctgaaactgtatgacgccctgagatctcgagacgtcgactcagtgcaccgcacactaacccccgatctcgactactggtttcacggcccaccgccgcaccagtttttgatgcgcacactcacgggagtctctccgacgtttgagttcgtgcctctctccgtagtctcattcggatccaccgtcatcgccgagggctgcgacgttgctagctccatctcctggatccacgcgtggaccgtcgcgcatgggataattatcactcaggtgagggagtactctaacacttctctcacggttacacgggtcggtgacgttgttgctggacggtctgctgagattgcgccgtcgcattgtccatcagtgtgggaaagtcagttctcgggtcgggctggaaagtccgtaccgggtctggttcttgcgatttaaggatttgttcacgtcagggaataacaatatctaaataaagactgcttacttgttgctttgttgtttatgggttgaaggatttgtgcggttgagacgcggtgtgggggtaacagctaaacgctgcgttttgcctgtcgctagttcttcttttgttggatatttgtgtgttttgtgttttagtgggtcaagcatggggaaactcaacttgacttgtgcggttgcgtcggatggttatgttataattgaaataaaaatgtgcttttggg

SEQ ID NO: 14 - protein, 105 aa, Brassica napus
MRTLTGVSPTFEFVPLSVVSFGSTVIAEGCDVASSISWIHAWTVAHGIIITQVREYSNTSLTVTRVGDVVAGRSAEIAPSHCPSVWESQFSGRAGKSVPGLVLAI

SEQ ID NO: 15 - DNA, 658 bp, Brassica oleracea
tgtatgacgccttgagatctcgagacgtcgattcagttcaccgcacactaacccccgatctcgactactggttttacggcccgccgccgcaccagttttgatgcgcacactcacgggagtctctccgacgtttgagttcgtgcctctctccgtcgtctcattcggatccaccgtcatcgccgagggctgcgacgttgctagctccatctcttggatccacgcgtggaccgtcgcgcatgggataatcactcaggtgagggagtactctaacacttctctcacggttacacgggtcggtgacgttgttgctggacggtctgctgagattgcgccgtcgcattgtccatccgtgtgggaaagccagttctcgggtcgggctggaaagtccgtaccgggtctggttcttgcgatttaaggatttgttcacgtcagggaataataatatataaataaagaccgcttactgttggttaattatttgtggtttggtaacacaaatggaggtgaactatatacttgggtaatgattgaatcgccgtgctttgcttaaagagtatttcgaccgtattccaagcctttgggttacacgaaatctctttgtaggataaaacaatcaaagtctcatttttgttctaggttaagatacaaaaataacaaa

SEQ ID NO: 16 - protein, 104 aa, Brassica oleracea
MRTLTGVSPTFEFVPLSVVSFGSTVIAEGCDVASSISWIHAWTVAHGIITQVREYSNTSLTVTRVGDVVAGRSAEIAPSHCPSVWESQFSGRAGKSVPGLVLAI

SEQ ID NO: 17 - DNA, 844 bp, Brassica oleracea
cccacgcgtccgtctccttcttcatcatctccaaatccctaattctcgtgttagctttcgattcaagaaactcgccaagaactggatactctggcggactcagagaccaagaaccgagacgtggttctgaaactgtatgacgccctgagatctcgagacgtcgaatcggttcaccggatcctcaccccggatctcgactactggttccacggccctccgccgcaccagtttttgatgcgcacgctcaccggcgtctctcctcccttcgaattcgtgcctctctccgtcgtctccttcggatccaccgtcatcgccgagggctgcgacgccgctagctccgtctcttggatccacgcctggaccgtgtcgcatgggataatcactcaggtgagggagtactcgaacacttctctcaccgtcacgcggatcggtggcgtcgtcgccggaaggtctgctgagattgcgcgctcgcattgcccctccgtgtgggaaagcaaattctcgggtcgggctggaaaatccgtaccgggtctggttcttgcgatttgaggagtaaaagtcacgtggattaataactaaataaaggctgcttacgtgtcggtgtgtggttggtttgtcgtatatgtgaggaatttgtgcggttggagacgcggtgtgggctgcgttttggctgtcgctagttcttcatttgttttttctttttaatttgctttataatcgcgcttttgtgttttagtgggtacagcaagcatggggatacccaaattggcttgtgccgttatgtctgatgtaacgtttggttatgttataattggaataaaaatgtgcgtttgggatctaaaat

SEQ ID NO: 18 - protein, 104 aa, Brassica oleracea
MRTLTGVSPPFEFVPLSVVSFGSTVIAEGCDAASSVSWIHAWTVSHGIITQVREYSNTSLTVTRIGGVVAGRSAEIARSHCPSVWESKFSGRAGKSVPGLVLAI

SEQ ID NO: 19 - DNA, 876 bp, Capsicum annuum
cggcagaggtgataatcctctctcttttgtacttatcctaataatctcttctctcctctttttccggaactggctaactctcagaaaactctggaagaaaccagaaacaaaggggtggtgctcgccctatatgaagctttgagctcacgtgacgttgacaaggtccagaaacttctggcctctgatctagagtggtggttccatggtccaccctcccaccaatttttgatgcgaattctcactggcactgccagtttggaccatcaactttttcaattcattcctcaaagcattgaagccttcgggtccactgtccttgttgaaggctgtgaacctggtcgctctattacttgggttcacgcttggactgttactgatggcagcgatgggataattactcaggtcagggagtatttcaacacctctctaaccgtcacccggctcgacaataataataataataatactaatagtccatcctcggatttctcttccatcgccacttcaagcaattgtccctctctttgggaaagcagtgtccccaataagtttgttccaggtcttgtcctggctctctgagtttgggtttgatccgattattgttgatgggctgaaatcgcaggtgttaaatcttgtgtccgggaggatgtaagttttaacggttggtttggggctttttgtttttattttatctgcaattttaatttgcttggagttgtttaattaaaagtagggaaaatggggttttggtggagttgggaaagtaccaccatgaatggaagacccttgtactgcttatgctattttgataaattatgtggtatggcgtgtttggtttgcagtaaaagcacttttttttcgtttgttaaaaaaaaa

SEQ ID NO: 20 - protein, 116 aa, Capsicum annuum
MRILTGTASLDHQLFQFIPQSIEAFGSTVLVEGCEPGRSITWVHAWTVTDGSDGIITQVREYFNTSLTVTRLDNNNNNNTNSPSSDFSSIATSSNCPSLWESSVPNKFVPGLVLAL

SEQ ID NO: 21 - DNA, 966 bp, Coffea canephora
cgtctttcctcagcctcttatatatcgaaaacaaaaaagcctctccttcttcgttcggaactggcaaacactcaaactctggaggaaactcaaaacaaagggctggtgctcgccctgtatgaagccttgagtgcacgtgacgtggacaaggtccagcggctcgtagctcccgacctggagtggtggttccatggtccgccttcccaccagtttctgatgcgcctcctcaccggcaatactgacaaagactccttcaatttcgtcccacaatcagtcgccgcctttggatccaccgtcctcgtagaagggtgcgatcaggcccgcaacatcacctgggttcacgcctggaccgtcactgatgggataattacccaagtccgcgagtacttcaacacttccctgacggtgacccgattcggggccgcagataatccctcctcctcgaattttgcccagattacctctctccattgcccgtccgtttgggagagcagtctcgctagccaagtcgggatatccgtgcccggtctcgtcctggctatttgactaaatttggattgggttgtgatctcctgctgctgcactactaatttattagtagtattatcgtaataattaaataaaaaaaggagtagtacgaggtgcaaccacgcttattgtggtttgagtcactcccatatgggctgaagtggtggcggtaaccggtaaagtcgtgccttacgtctgcgaagatgtaggatcgacggtcgggatcgcttttcacttttcagcgcgtcgtttttagtccctttaaagtgcgtgtttgcttttgttctgttctgttatgtcctgttcaagggcatatattatgtttgagtccatcatgactgggaagggttcctggtatttggtctcggatgacgtcactcctatatgttttgtttgccttttcaataaatgttgtcggatttgtttgcttgataaaaa

SEQ ID NO: 22 - protein, 109 aa, Coffea canephora
MRLLTGNTDKDSFNFVPQSVAAFGSTVLVEGCDQARNITWVHAWTVTDGIITQVREYFNTSLTVTRFGAADNPSSSNFAQITSLHCPSVWESSLASQVGISVPGLVLAI

SEQ ID NO: 23 - DNA, 957 bp, Citrus clementina
ccagaatcaccaaaccaattcctttcctcctccgtttctctgtttttgttgttgccattttttaaggctattccgtccagaactggctaactcccagcagaaaaatccggaagattccgaaaacaagaaccagcgcgtggttcttgctctgtatgatgccttaaaatctccagacgttgaaacggtacacaagatccttgccccggacctagagtggtggttccatggcccgccgacccaccagtttatgatgcaccttcccaccggcagcaccaccgcatcgtcagcatcgcaaagctccttcgtattcgttcctctctcgatcacatcgttcgggcccattgtcctcgccgagggctgtgatcacagccgtcaaatcagctgggtccacgcctggacggtcgctgatgggataattactcaagtcagagaatacttcaacacttcgcttaccgtcacccgcttcggtaaagacttgtctggccaaagtcagaggaagaaatcaccaccctctgatttcccatcaacagcggagattaatccggtgcattgcccctccgtttgggagagcagcgtctccaaccgggacggtaaatctgtcccgggtttggttctcgctctctaagcaaaccaaaaaagggaccgagattgatcctgtgcagccgcgtgtattataatattataccatattaacatataaataaaggctgcacgtgacgcgtgtcgcccccgtgtgggccctcgcttagagatgtgagtgactgaggccctggttgggggagtgctttgggttgttttccgccttatttttgtgtctggccttccggttttgtttgtttgataatgttggtccttccgggtccgatcatgatgtgtgaacccgacctccgtgggtggatcccgcctgtgtttaagtcaattggtgcctggatttacgcaaaaaattgggttgttttt

SEQ ID NO: 24 - protein, 125 aa, Citrus clementina
MMHLPTGSTTASSASQSSFVFVPLSITSFGPIVLAEGCDHSRQISWVHAWTVADGIITQVREYFNTSLTVTRFGKDLSGQSQRKKSPPSDFPSTAEINPVHCPSVWESSVSNRDGKSVPGLVLAL

SEQ ID NO: 25 - DNA, 819 bp, Cichorium intybus
ggcggggatccacacatttgtcatttggatctccatttctaatcgtctgcatattctctctctaaagtttccacaagacgtcaatttctgaccgaactggctaaccctcaagaagctctggaggattccagcaataagagcgtggtgctccagctctaccatgccctaagctctcgcgacgttgaaaccgtccacaagctcttagcacctgacctcgagtggtggttccatggccctccgtctcaccagtatatgatgcgattgctcactggaaccgacaacgacaacactgactccttcgaattccttcctctttccgttgacgccttcggatctacagtcatcgtcgaaggctgcgatcaggatcgcgaaatctcctggatccacgcctggacggttaattcgtatggcataatcacacaggtacgggagtacttcaacacttccctcaccgtcactcattttgatagtaactcttccaaacccgtccccattacttccctccattgtccctctctgtgggagagtagcctctctaatcgggtcggaaaatcggttccgggtttggtactggctatatagtaaagggccggatcccctgtgtccgtttacttgatattaaatacttatcgtgtgcttgaataaaactacaagtcaaagtcaaatttgagagcgtgactattctatgggttgaactaacgtggtatcttgcgtctgcgaggatgtaaacgtgcggttgagattcgtggatactgtttggttacagcttctaatttcgtctgtttggttattagtttccgtttgtgtggtttgcgtttg

SEQ ID NO: 26 - protein, 109 aa, Cichorium intybus
MMRLLTGTDNDNTDSFEFLPLSVDAFGSTVIVEGCDQDREISWIHAWTVNSYGIITQVREYFNTSLTVTHFDSNSSKPVPITSLHCPSLWESSLSNRVGKSVPGLVLAI

SEQ ID NO: 27 - DNA, 1011 bp, Curcuma longa
gattttaagcaagaacagagacatcttctattcgatatataagacactgatgaacacacaaaggatgacatgaatccttccgtcttcatcttaattaaaacttaattaatagaagcaaaccacccactaagcttaattatcagcccattaattgatatatatcgctaattaatatgtcgtgattaggattaattgcgtctaaatcgcgaggaccagtccaggaaaggacttgtcgcggcggctctgccagacgggcagacagtgagtcggtccaggcgaaaccgacggcttggtggttgagtcagcggcgaagcgggtgacggtgacggaggtgttgaagtactcccggacctgggtgattatcccatccggggagacggtccaggcgtgaacccaggaggcggcgccggggccggtgccctcggcgacgacggtggagccgaaagtggcgactcggtcggggacgaatcggaactcggcagcggcttcgtcgtcagcgccggtgagcatgcgcatcatgtgctggtgctccggagggccatggaaccaccactcgacctcgtgccgaattcggcacgaggaattcctccaataaatagatccctccatcatcaccatgtcgacctgcggcgattgcagttgcactgacaagtcccagtgcgtgaagaagggaaccagctatacggttgatatcgtcgtcgagactgagaagagctacatgaacgaagtggtggacggtgcagcggccggtgaggagaacgagccgtgccagtgcggccctgcctgtgcttgttttgactgccagtggggcagcgtcatatgatggaaccccttccgcgccgcctatggaattagttttatgaagaaataaggacaaaaatgttgtggtttgtgtgtggctttctatgaagcaaagcagtgtgttaattgtgtgctaagaggagattgtggttcccatcagcataatctccctttaggggtaattaattaacctatatatatatatagttt

SEQ ID NO: 28 - protein, 139 aa, Curcuma longa
MVMMEGSIYWRNSSCRIRHEVEWWFHGPPEHQHMMRMLTGADDEAAAEFRFVPDRVATFGSTVVAEGTGPGAASWVHAWTVSPDGIITQVREYFNTSVTVTRFAADSTTKPSVSPGPTHCLPVWQSRRDKSFPGLVLAI

SEQ ID NO: 29 - DNA, 908 bp, Curcuma longa
aagcaagcacacaagcatatcttttattcaatatataacaggatgataaacacagtggatgagcatcaacaggtactgaaggaagagggaaggatgacatgaatcctttacacttcaccttcatcttaattaattacctattaaaactagaataattaaagcaagcaaaccacagacttaactctaggactcgaatgatagtgaccttatcaacccatctagtgatcgatcgatatatttattaagccttcaccttggtgattaagattaatttctggattattaggcttaatgatttggattaactatgtttaaatcgccaggacgagtccaggaaaggacttgcggccgcggctctgccacacgggcaggcagtgagtcggcctgggcgagtccttgggcgagaccgagggcttgggcggcgagtcagcggcgactcgggtgacggtgacggaggtgttgaagtactcccggacctgggtgattatcccatccggggagacggtccaggcgtggacccaggtggtggcggcgccggggccggtgccctcggcgacgaaggtggagccgaaggcggcgactcgttcgggtaagaatcggaacacggcggcggtgtcgtcgtcagcgccggtgagcatgcgcatcatgtgctggtgctccggcgggccatggaaccaccactcgatgtcgggggcgagcagctgctgcacccggtccgcgtcgcgaccgttcagggcctcatacagcgagagcactcgccacttgttgcggtcctccacgctctctcctgcgctctggttagccagctccggacgagccccctcggctctctcgcgacctccctctctctttccctctcgctgcctgcggaagcggtgctctcggtcggcgaactcggtcactggtgc

SEQ ID NO: 30 - protein, 111 aa, Curcuma longa
MMRMLTGADDDTAAVFRFLPERVAAFGSTFVAEGTGPGAATTWVHAWTVSPDGIITQVREYFNTSVTVTRVAADSPPKPSVSPKDSPRPTHCLPVWQSRGRKSFPGLVLAI

SEQ ID NO: 31 - DNA, 996 bp, Citrus sinensis
ggggaaagccatcaccagttctctctggtaacccttatccagaatcacaaaacaaattcatttcatcttcagtttctctgtttttgttgttgccattttttaaggctattccgtcaagaactggctaactctcagcagaaaaatccggaagattccgaaaacaagaaccagcgcgtggttcttgctctgtatgatgccttaaaatctcgagacgttgaaacggtacacaagatccttgccccggacctagagtggtggttccatggcccgccgacccaccagtttatgatgcaccttctcaccggcagcaccaccgcatcgtcagcatcgcaaagctccttcgtattcgttcctctctcgatcacatcgttcgggcccattgtcctcgccgagggctgtgatcacagccgtcaaatcagctgggtccacgcctggacggtcgctgatgggataattactcaagtcagagaatacttcaacacttcgcttaccgtcacccgcttcggtaaagacttgtctggccaaagtcagaggaagaaatcaccaccctctgatttcccatcaacagcggagattaatccggtgcattgcccctccgtttgggagagcagcgtctccaaccgggacggtaaatctgtcccgggtttggttctcgctctctaagcaaaccaaaaaagggaccgagattgatcctgtgcagccgcgtgtattataatattataccatattaacatataaataaaggctgcacgtgacgcgtgtcgcccccgtgtgggccgtcgcttagagatgtgagtgactgaggccctggttgggggagtgctttgggttgttttcgcctttatttttgtgtctggctttccgggtttgtttgtttgatatgttggtctttccgggtcggatcatgatgtgtgaacccgaactcggttggttgtatccagctgttgtttatgttaattggtgctttgattatcgaataaaaattggttgttttat

SEQ ID NO: 32 - protein, 125 aa, Citrus sinensis
MMHLLTGSTTASSASQSSFVFVPLSITSFGPIVLAEGCDHSRQISWVHAWTVADGIITQVREYFNTSLTVTRFGKDLSGQSQRKKSPPSDFPSTAEINPVHCPSVWESSVSNRDGKSVPGLVLAL

SEQ ID NO: 33 - DNA, 736 bp, Centaurea solstitialis
tcccacattatattgtgaaaacctctagtccatccattatcgactgaactacacgtcatataaaattaattaattaacatgtgtaagtgtaacccacaccaccaaaccccgcccgaggaatgccgccggaatcttttgtccaacttctaccaagcattggccgccggagacgccgccaccatccaccgcctcttagcttccaacatcgaatggtggttccatggtccgcggtcgtgcaaccgtcttatggccttcctcaccggcgccaccaccaccaccacctccagcgaccgcttcttcactttcaacccactctccgtcgtgtccatcggatcgctggtggtggcggaaggctactactcgccggagacccgtgacgtcagctgggtccatgcgttgaccgtcgttgacggggtcataacgcaggtgagggagtatttcaacacttccgttacggtcacccgtttcgccagctcagcaaacgtccacgtggcgtcaaatggtggtgacagttgtcagtgtgtgtggcagagcaagctgactgatagtaaatctatgcctgctcttcttattgctgtttaaggggaactcaagtcaacgattttagcaatcatttgaactttattttcataagatctagagcaaattacggttttagtccctgtgatttgttaaagctatgatttccatccctgtgatttagtaattgtcaatttcatccttacggtttgcatcc

SEQ ID NO: 34 - protein, 167 aa, Centaurea solstitialis
MCKCNPHHQTPPEECRRNLLSNFYQALAAGDAATIHRLLASNIEWWFHGPRSCNRLMAFLTGATTTTTSSDRFFTFNPLSVVSIGSLVVAEGYYSPETRDVSWVHALTVVDGVITQVREYFNTSVTVTRFASSANVHVASNGGDSCQCVWQSKLTDSKSMPALLIAV

SEQ ID NO: 35 - DNA, 667 bp, Centaurea solstitialis
atcacattttctcgtctttgtctgggttagtacgccgaccagcaactgtatggcgataattcaatactggcacgcacgtgcgcaacctgtgaggacgataccaggattcggattggtatgagcgcgctgcgcgcgtacgataggctgcccggaggggaacgcgcatccaacgtggccttatgtatctgagcacccgacctcaggtggtggtgccatgatccccggtctcagcattacatggtgcgattgctcaccggtacggataacggcgcaacagactcctttcagttcggtccgaccacgatcgacgccttcgggtccatggacatcgacgaaggctgcgatcagcgtcgcgacatctccgggatccacgcctggaccgtaagctcggacgggataattacgcaggtcagggagtactttaacacttcccttgccgttactagattcggtggtggtaactgtaactcggctacgaaaaaaccggtttccgttactactacgtcgtccttgcattgcccttacctttgggagagtagactctctggtcgagtcggacgaaaatcggttcctggacttgttctggcgatgtaatgatagaattaaagaaatcacatcttctccgtaaacaataagagtcgaattcggattgtggatttgtgatttg

SEQ ID NO: 36 - protein, 118 aa, Centaurea solstitialis
MVRLLTGTDNGATDSFQFGPTTIDAFGSMDIDEGCDQRRDISGIHAWTVSSDGIITQVREYFNTSLAVTRFGGGNCNSATKKPVSVTTTSSLHCPYLWESRLSGRVGRKSVPGLVLAM

SEQ ID NO: 37 - DNA, 758 bp, Centaurea solstitialis
aaatcccaaaattacctttcacacctctcctataaaaaccaccccaatcccatacacctcttccaccatctccattttccgaccacctccgattccgattccgattccgatcatatcctttttcctaaaagcttaattctctcacagaactggccaaccttcaagaagctctggaggattccggcaacaacgagagcgtggtgctcgcactctaccatgccctgagctctcgcgacgtccaagtcgtccacaagctcctagctcccgacctcgagtggtggttccatggccctccctctcatcagctcatgatgcgattgctcaccggaaccgataacgacacaacagacacctttcagttcgttccgacctcgatcgacgccttcgggtccacggtcatcgtcgaaggctgcgatcaacgccgtgacatctcctggatacacgcctggaccgtaagttcggacgggataattacgcaggtcagggagtactttaacacttcccttgccgtcactcgattcggtggtaactgtaactcggctacgaaaaaaccggtttcggttactacgtcgtcgttgcattgcccttacctttgggagagtagtctctctggtcgcgttggagggaaatcggttcctggccttgttctggcgatatagtaatagaattaaagaaatcacatcttctccgtaaacaataagagtcgaattcgggttgtggatttgtgatttggtaggatgtaagatactaagatctgc

SEQ ID NO: 38 - protein, 116 aa, Centaurea solstitialis
MMRLLTGTDNDTTDTFQFVPTSIDAFGSTVIVEGCDQRRDISWIHAWTVSSDGIITQVREYFNTSLAVTRFGGNCNSATKKPVSVTTSSLHCPYLWESSLSGRVGGKSVPGLVLAI

SEQ ID NO: 39 - DNA, 837 bp, Centaurea solstitialis
cccctcgtggctcgcgctatataaggcttgctttgctttgcatcttttcacatttctatcaccaagtcccaacattatattgtgagaaccttccatccatccattatcgactgaactacacgtcacataaaattaattaattaacatgtgcaagtgtaacccacaccaccaaaccccgcctgaggaatgccaccggaatcttttgtccaacttctaccaagcattggccgccggagacgccgccaccgtccaccgcctcttagctcccaacatcgaatggtggttccatggtccgcggtcatgcaaccgtcttatggccttcctcaccggcgccaccaccacctccggcgaccgctccttcactttcaacccactctccgtcgtgtccatcggttcgctggtggtggccgaaggctactactcaccggagacccgtgacgtcagctgggtccatgcgttgaccgtcgttgacggggttataacgcaggtgagggagtatttcaacacttccgttacggtcacccgttttgccagctcagcaaacgtccacgtggcatcgaatggtggtgacagttgtcagtgtgtgtggcagagcaagctgactgatagtaaatctatgcctgctcttcttattgctgtttaaggggaactcaaagtcaatgattttagcaatcattttaactttattttcataaaatctagagcaaattacgattttagtccctgtgatttgttaaaactatgatttccatccctgtgatttagtaattgtcaatttcatccttacggtttgcattctattgccattttcgtccctagggactaatttttatatct

SEQ ID NO: 40 - protein, 165 aa, Centaurea solstitialis
MCKCNPHHQTPPEECHRNLLSNFYQALAAGDAATVHRLLAPNIEWWFHGPRSCNRLMAFLTGATTTSGDRSFTFNPLSVVSIGSLVVAEGYYSPETRDVSWVHALTVVDGVITQVREYFNTSVTVTRFASSANVHVASNGGDSCQCVWQSKLTDSKSMPALLIAV

SEQ ID NO: 41 - DNA, 808 bp, Centaurea solstitialis
tccctcggacctcatttccgccattaatctccaccttctctctctagaaaaacactttctctctctaaaaaaccactcaaaacagtcgtcaatttctgaaccgaactggctaactctcaagaagctctggaggattccatccctaacaagaccgtagtgctccagctctacgatgccctaagttctcgagacgtcgaaaccgtccacaagctcctcgcccctgacctcgagtggtggttccatggcccgccgtctcaccagtatatgatgcgattgctcaccggaaccgataacagcagcaacaattcaaaagcatcatccacctgcttcaacttcgtgccgcattccgtggacgcattcggatccacggtcctcgtcgaaggcctcgatccggaccgcgagatcttctggatccacgcctggacggttagttcgcagggagtcatcacgcaagtgcgcgaatactttaatactagccttacggttactcgatttggcgttggttcgggttcgtcgaaatcgaaatcggttgcgattacggcgctccattgtccttcggtttgggagagcagtttgtcgaatcgggtcggaaagtcggttccgggtttggtacttgctatataatataactagatttgatcccgtgtaatacacaggataattttaaaaaaaaaaaaaactactcatatagtcaaggggagggatcctctgtggtgtggtttattattatagcgtgtggttgaataaaagaataaagtcaaaggtcaaagttgagaggtgtgattattacctatgggttgaagttgac

SEQ ID NO: 42 - protein, 119 aa, Centaurea solstitialis
MMRLLTGTDNSSNNSKASSTCFNFVPHSVDAFGSTVLVEGLDPDREIFWIHAWTVSSQGVITQVREYFNTSLTVTRFGVGSGSSKSKSVAITALHCPSVWESSLSNRVGKSVPGLVLAI

SEQ ID NO: 43 - DNA, 746 bp, Carthamus tinctorius
gcgggacccccaatccctcggacctcatttccgccattaatcttcttctccacttccttctctctttctctctctaagaaaatcactcacagtcgtcaatttctgaccgaactggctaactctcaagaagctctggaggattccagccataacaagagcgtagtgctccagctctacgatgccctaagctctcgagacgtccaaaccgtccacaagctcctcgcccctgacctcgagtggtggttccatggccctccgtctcaccagtatatgatgcgattgctcaccggaaccgataacaacaacaacgacttcagtttcgtgcctcattccgtcgacgccttcggatctacggtcctcgttgaaggctgcgatccggatcgcgagatcttctggatccacgcctggacggttaattcgaacggcgtaatcactcaggtgcgtgaatacttcaatacttcgctcaccgtaactcgatttggcgttaaaacctcttcttcttcttcttcttccaaatccgtcgccattactgcgctccattgtccttctgtttgggagagcagtctctcgaatcgggtcggaaagtcggttccgggtttggtactggctatataggggagggatcccctgtgtggtcgttgcttcgtgtaggttattatcgtgtggttgaataaaggaataaagtcaaagtcaaagttggaggggtgtgattacctatgggttgaagtcgacgtgttatcctgcgt

SEQ ID NO: 44 - protein, 114 aa, Carthamus tinctorius
MMRLLTGTDNNNNDFSFVPHSVDAFGSTVLVEGCDPDREIFWIHAWTVNSNGVITQVREYFNTSLTVTRFGVKTSSSSSSSKSVAITALHCPSVWESSLSNRVGKSVPGLVLAI

SEQ ID NO: 45 - DNA, 803 bp, Carthamus tinctorius
cgggatccattttccgacaccacctccctccgatcccgattccgatcacatccttttcctaaagcttaaaatctcccacagaactggccaaccttcaagaagctctggaggattccggcaacaacgagagcgtggtgctcgcactctaccatgccctgagctctcgcgacgtccaagtcgtccacaagctcctagctcccgatctcgagtggtggttccatggccctccgtctcaccagtttatgatgcgattgctcaccggaacggataacgacacagccgactcgtttcagttcgtgcctacttcgatcgacgccttcggatccacggtcatcgtcgaaggctgcgatcagcgccgcgacatctcctggatccacgcctggaccgtcagttccgacgggataatcacgcaggtcagggagtacttcaacacctccctcaccgtcactagattcggtaactgtagctctacgaaaaaacctgtttccgttacgtcgtcgttgcattgcccttacctttgggagagtagtctctctaatcgcgtcggaaaatcggttcctggcctggtcctggcaatataaaatagaattgtagaaatcacatcttctccgtaaacaataagagtcagattcggattgtgagttttgtgatttggtaagatgtaagatctgcttttgtgtggttgttagtttggttttgtgttatccgtgtttaggaacaattgtaatccgtcatgtggatcctatcctgtttgtggtcaagttatgtgcttaatatgacatcgcacctttgttttgtgataa

SEQ ID NO: 46 - protein, 112 aa, Carthamus tinctorius
MMRLLTGTDNDTADSFQFVPTSIDAFGSTVIVEGCDQRRDISWIHAWTVSSDGIITQVREYFNTSLTVTRFGNCSSTKKPVSVTSSLHCPYLWESSLSNRVGKSVPGLVLAI

SEQ ID NO: 47 - DNA, 871 bp, Euphorbia esula
  misc_feature (808)..(812): n is a, c, g, or t
tggttcattttcatcatctccatttttaaaagctcctccttctctctctagaaattatcctctttctctctcttcgggctggctaactcacaggaaattctggacgaatcttccagaaagaaccaagaggtggttcttgccctctatgacgccttgagatctcgagacgtcggcacggtttcaaagatcctcgctcccgacctcgagtggtggttccacggccctccgactcaccaatttttgatgcaaatcctcaccggcgcggccaccacaactgattttgaattcaaacctgaatttgtccgggcgttcggttcaatcgtaatcgccgaaggctgtgacccgacccgctccatttcctggattcacgcctggactgtcaccgccgatgggataatctctcaggttagagagtacttcaatacttctctcactgttactcgtttcggaaatcaatctcaatcgccgtctgtttcttctacggcgggaataacgccggtgcattgcccgtccgtttgggagagcagtctctctaatcgggtcggcaaatcggtgccgggtttggttcttgcaatttaggtggacccgggatagaaagggactctgatcaagtgtgcgcgttactattataataaaattaagctagtggaataaagataggtggcacgtgttccgcgtgtgagtgagaaaaggagatgtgagtcagctaaggaaggggcggttgtttgttatgtgttgatttttattcgtattttgtgctatttttgttgtttagtttccttttttttgggtgttgaaaaacaaggannnnnaaatgggtcttaaatttgggttgtttgctgatgtaataaaaatgtcttattgtgatttt

SEQ ID NO: 48 - protein, 111 aa, Euphorbia esula
MQILTGAATTTDFEFKPEFVRAFGSIVIAEGCDPTRSISWIHAWTVTADGIISQVREYFNTSLTVTRFGNQSQSPSVSSTAGITPVHCPSVWESSLSNRVGKSVPGLVLAI

SEQ ID NO: 49 - DNA, 664 bp, Euphorbia tirucalli
cgggaaattctggacaatcatcgagaaagaaccaagaggtggttcttgccctctatgaggccttgagatcccgagacgtcgacacggtgcagaaaattctcgcccctgatctcgagtggtggttccatggtccgccgtctcaccagtttttgatgcgaatcctcaccggcgctgacaacagagctaattccaattcctccggtttcgaattcaaacctgaattcgttcaggctttcggttcaatcgtcatagctgaaggctgcgatccgacccgctccatttcctggatccacgcctggactgtctccgatgggataatttctcaggttagagagtacttcaatacttctcttactgttactcgattcggaaatcaagaacaaccgccggcgccatcgccatcgccctcggtttctcctgcttcttcgtcatcttcgtcatccacggcggggataacccctgtgcattgcccgtccgtttgggagagcagcctctccaatcgggtcgggaaatcggttccgggtttggttctggcaatttaagaggaaccgaaacagtaaccagaaagggtcgtatcaggtgtagcccgttagtatattgtactggaataaagacaggttgcaccgtgtgtgtcgtgtgaatgtgaacagggatgtgagtcagc

SEQ ID NO: 50 - protein, 129 aa, Euphorbia tirucalli
MRILTGADNRANSNSSGFEFKPEFVQAFGSIVIAEGCDPTRSISWIHAWTVSDGIISQVREYFNTSLTVTRFGNQEQPPAPSPSPSVSPASSSSSSSTAGITPVHCPSVWESSLSNRVGKSVPGLVLAI

SEQ ID NO: 51 - DNA, 1083 bp, Fragaria vesca
ctctcttctccttgttcgcttcacattcacattcatctccaaacccacctcgatttctgtacccgcctcgtgggcttaggctagaactggcgttatctcaagaacccgactccgattccgactccagcaatcaccggctggtcctgaccctctatgacgccttgagctcccgtgacgtggccaccgtccacaccatcgtcgccgccgacctcgagtggtggttccatggtccgccgacacaccagttcttgatgcgcatgctcaccggcgaaaaaaacgacgagtcgtttgtcttccgccctcagtctgtttgctccgtgggccccgtcgtcctagtggagggttccgacccagcgaaggagatctcctgggtgcacgcctggaccgtcacggatgggatagtcacccaggttagggagtacttcaacacttccctcaccgtcacccgcctcggtaactccacaaccaaatccaagatttccaaatcgacggccgagattacatcgtaccattgcccctccgtctgggagagctccaacccggtcgggaagtcggttccgggtctggtcctcgccatctgaaaaagtcctttttcttctctggcgcgtggtttttatttatctcttaaataagttattgttattatcaataagtgggggattacgtgtcgggagctgagtggcttctgcggatgggctgaagcggcttgggtcacggagatgtaacgtcccgttagagtttgttttggtttcggtttgttgtcttctagtttggtttggtttgttgtttttgtgtgtgtgctggtgttgggtggaaccatggggtcgagggccttttggtcatatcctgacgcgtctattttatgttgttctccgtatgcaataaaaacatgcgttttcgataatctctggagttcagttttgatgattagcgataatcggctgtcattaaccacatcgttacaatcaaggactaaaaaatcgggtttcggggaaatatcgatggtccgaaaattggatatttccacggaaatattgtggatatatcgaaagtatgaaaattaatatatttattatgatcttc

SEQ ID NO: 52 - protein, 109 aa, Fragaria vesca
MRMLTGEKNDESFVFRPQSVCSVGPVVLVEGSDPAKEISWVHAWTVTDGIVTQVREYFNTSLTVTRLGNSTTKSKISKSTAEITSYHCPSVWESSNPVGKSVPGLVLAI

SEQ ID NO: 53 - DNA, 769 bp, Gossypium arboreum
  misc_feature (769)..(769): n is a, c, g, or t
attttctcaaacattcttcaatcttttcatctctcctcagacccgatcgatctatcttcttgctccgttccctctttcaagaactggctaacacacaggaaccacttgtggaggaaactaacaagaaccaagaggtggttcttgccctctatgaggccttaaacactcgagacgtcgaaactgttcacaaaatccttgcccctgaccttgaatggtggttccacggtcccccgactcaccagtttttgatgcgcctgctcaccggtgcttcatcctacgattctttccgtttcgaggttgatcccctttcggttaccacctttgggcccaccgtcatcgtcgaaggctgcgatcacagccgttcaatctcttgggttcacgcttggaccgtaaccgatgggataattacccaagtgagggaatacttgaacacttctctcaccgttactcgccttggaaactctacccaatctccaccgtccgactacaatcctccatcatcatcatcatcatcgacgggtgagattacctcggtgcattgcccttccgtctgggagagcagcttttccaacagggttggaaaatccgtgccgggtcttgtcctggcaatttagtcatttcactatcatatatctctctgatcaggtgcagccgtgagtaggaataaaataaaataaagggagtactttcgtgtcagatccgtattggtcttctacttgcggatgcactaaaaaacagtgtcgcttaaggagagagagagagatcaaan

SEQ ID NO: 54 - protein, 121 aa, Gossypium arboreum
MRLLTGASSYDSFRFEVDPLSVTTFGPTVIVEGCDHSRSISWVHAWTVTDGIITQVREYLNTSLTVTRLGNSTQSPPSDYNPPSSSSSSTGEITSVHCPSVWESSFSNRVGKSVPGLVLAI

SEQ ID NO: 55 - DNA, 967 bp, Gossypium hirsutum
acgcgggggatcctcaccagttgtttctggtattttctcaaacattcttcaatcttttcatctctcctcagacccgatcgatctatcttcttgctccgttccctctttcaagaactggctaacacacaggaaccacttgtggaggaaactaacaagaaccaagaggtggttcttgccctctatgaggccttaaacactcgagacgtcgaaactgttcacaaaatccttgcccctgaccttgaatggtggttccacggtcccccgactcaccagttcttgatgcgcctgctcaccggtgcttcatcctacgattctttccgtttcgaggttgatcccctttcggttaccacctttgggcccaccgtcatcgtcgaaggctgcgatcacagccgttcaatctcttgggttcacgcttggaccgtaaccgatgggataattacccaagtgagggaatacttgaacacttctctcaccgttactcgccttggaaactctacccaatctccactgtccgactacaatcctccatcatcatcatcatcatcgacgggtgagattacctcggtgcattgcccttccgtctgggagagcagcttttccaacagggttggaaaatccgtgccgggtcttgtcctggcaatttagtcatttcactatcatatatctttctgatcaggtgcagccgtgagtaggaataaaataaaataaaaggagtactttcgtgtcagatccgtattggtcttctacttgcggatgcactaaaaaacagtgtcgcttaaagagagagagagatcaaaaatgtgaatttggttaagaccctggtccggagggtcatattaatatctgtttctacctaggtttgcttttgtggctggttccattggtattgtggtaacttggccatggatggggcactgtgtttggggaatcctccggccctttgtcccaaaaaaaattcgctattttt

SEQ ID NO: 56 - protein, 121 aa, Gossypium hirsutum
MRLLTGASSYDSFRFEVDPLSVTTFGPTVIVEGCDHSRSISWVHAWTVTDGIITQVREYLNTSLTVTRLGNSTQSPLSDYNPPSSSSSSTGEITSVHCPSVWESSFSNRVGKSVPGLVLAI

SEQ ID NO: 57 - DNA, 1352 bp, Gossypium hirsutum
ggttcacgcttggactgttcgtgatgggataatcacccaagtgagggagtatttcaacacttctctcaccgttactcgccttagagactctccaccgtcagcttgcagttcttcgacggcggagattgcgccagtgtattgcccttacgtttgggagagtagtctttccaaccgggtggggaaatcggttccaggtcttgttcttgcaatttagtttcctcctcccacgtgtggctaagataacagatgttagttccatgagttgagtttggtctggtgttaaaaattattgtgtctggactgtcaatttggtaacttattagtattgttgtgtttcaagtgttgtcttccaatgcaattggatttagtgaagtgtgtggggtccggtatgagaagagttcctccacctcctcattttcagtgtttccattgtgtaataaaaatctgctatcttcttcgattgcacaaaaccaaatcatctttgctttgctattttggttcgttttgctaagaactggctaacgcacagcaaaaaatcgtggaggaaaccaacaagaaccaagcggtggttcttgccctctatgaagccttaaacacacgagacgtcaacaccgttcaccaaatccttgctcccgatctagagtggtggttccacggtccacccactcaccagtttttgatgcgcttactcaccggcgcttcatccgacgatcctttccttttcgaggtcgaccctgttttagtcaccgcctttggatccaccgtcatcgtcgaaggctgtgacaacagccgttcgatctcctgggttcacgcttggactgttcgtgatgggacaatcacccaagtgagggagtatttcaacacttctctcaccgttactcgccttggagactctccaccgtcagcttgcagttcttcgacggcggagattgcgccggtgcattgcccttacgtttgggagagtagtctttccaaccgggtggggaaatcagttccgggtcttgttcttgcaatttagtttcctcctcccacgtgtggataagataacagatgtgagttccatgagttgagttgggtctggtgttaaaattattgtgtcagaactgtcaatttggtaacttattattgttgttgtgttgtgagtgttgttttccaatgcaattggatttagtgaagtgtgtggggtccagcatgagaagagttcctcctcctccttctcattttcggtgtttccattgtctaataaatatctgctatcttcttcactttcttattattgcagatacttctacttcttttctccttattattttaaaagtaagacccccctattgtctcgtcctctgcctgat

SEQ ID NO: 58 - protein, 112 aa, Gossypium hirsutum
MRLLTGASSDDPFLFEVDPVLVTAFGSTVIVEGCDNSRSISWVHAWTVRDGTITQVREYFNTSLTVTRLGDSPPSACSSSTAEIAPVHCPYVWESSLSNRVGKSVPGLVLAI

SEQ ID NO: 59 - DNA, 992 bp, Glycine max
aactcaaacaacaaaaataagacattgtttggtttggttacttgctcgaatttcctcgaatcgcttaatttgtatttgattagttaaaccgcaacgcggaatctcttttctcgaactggctaactctcaggcaagtggttcggacgctgattccagcaacaagcggctggtgctcgcactgtatgacgccctaaactccggcgactccgacgccgtcgtcaagatcgtcgccgccgacctcgagtggtggttccatggtccgccctcacaccagtttttgatgcgcatgctcaccggcgactccgctgccgacaactccttccgcttccttccgcagtccatcgccgccttcggctccaccgtcatcgtcgagggctgcgacaccgcccgcaacattgcctgggtccacgcctgcaccgtcacggatgggataattactcagatcagagagtacttcaacaccgccctcaccgtcacccgcatccacgattccggcgagattgttccggctagctccggcgccggccgtttgccctgtgtctgggaaagcagcgtctccggtcgggtcgggaaatccgtacccggtttggttcttgcaatataaaataattattaacaagtaattagggaagaacgcggtcacgtgtgaataataattaaataaggaggttgtgcacgtggcggtgactgggtcgaacggtttcagggaacattgatatattttcgtagtattggtgtgttctagaggttagagagatgtgagaccctattggtggggtttcttatttctttaattttctcaggtttggtttgtttttgttttgtttgcttgtgtgttttgggaaccactatgggcctatccaggtggctgtatctttcttttgtaatgcggtttgttgatgatgatgatgatgcaataagaatatctatggattatggttttaagaactgtgttgtgatgatgctaaattcgtttattattttatttagta

SEQ ID NO: 60 - protein, 107 aa, Glycine max
MRMLTGDSAADNSFRFLPQSIAAFGSTVIVEGCDTARNIAWVHACTVTDGIITQIREYFNTALTVTRIHDSGEIVPASSGAGRLPCVWESSVSGRVGKSVPGLVLAI

SEQ ID NO: 61 - DNA, 477 bp, Glycine max
gagctggcaaactcgtcgcaaaaaccatggctagaggatcaagaggatcccaacaagagaggggtgatagacttgtacaacgccatactctccaatgacactgacacaatgcagcgccttctagctccagacctggagtggtggttccacggtccaccgtgtcaccgccaccacctcgttcccctcctcacgggctcctcgtcgaagcctttagtccctgatctcgtagttgggtttggatcagtgactattgctgaaggcttcgacgagagcaacttggtgtggtgggtacatgcatggaccaccactgacgaaggcatcatcacggaggttagagagtatgtcaacacttccgtcactgtcaccaagctcggtttgcatgtgaacaacgatgatgttgtttctgccacgtgtcagagtgtctggcagagcaagctctgcgatgagtctgttccgggactcattcttgccatctag

SEQ ID NO: 62 - protein, 122 aa, Glycine max
MQRLLAPDLEWWFHGPPCHRHHLVPLLTGSSSKPLVPDLVVGFGSVTIAEGFDESNLVWWVHAWTTTDEGIITEVREYVNTSVTVTKLGLHVNNDDVVSATCQSVWQSKLCDESVPGLILAI

SEQ ID NO: 63 - DNA, 893 bp, Glycine max
tttggtttggtttggttacttgaaaatctcgaatcgcttaattttgatttagttttccaccgcaacgcggaacctctttctcgaactggctaactctcaggcaagtggctcggacgctgattccagcaacacgcggctggtggttgcactgtatgacgccctaaactccggcgactccaacgccgtcgtcaagatcgtcgccgccgatctcgagtggtggttccatggtccgccctctcaccagtttttgatgcgcatgctcaccggcgactccgccgccgacaactccttccgattcgttccgcagtccatcgccgccttcggctccaccgtcatcgtcgagggctgcgactccgcccgcaacattgcctgggtccacgcctggaccgtcactgatgggatgatcactcaaatcagagagtacttcaacaccgccctcaccgtcactcgcatccacgattccggcgagattgttccggccagatccggcgccggccgtttgccctgcgtctgggagagcagcgtctccggtcgggtcgggaaatccgtccccggtttggttctcgcaatataaaatataaaataagtaattagggaaggacgaggtcacgtgttgccgttgctataataattaaataagggacttgtgcacgtggcggtgactggatcgatcggtttcagggaacattgatactttgtgttagtattggaggttagggagatgtgagagctttgttgttattggtgtggtttgttttgtttgcttgtgtgtttttcaccactatgggcgtattcaggtggttgtatctttcttttgttatttggagtgttgatgatgatgcaataagaatatctatggactatgcttttaagagttgggttgtgatgatgcc

SEQ ID NO: 64 - protein, 107 aa, Glycine max
MRMLTGDSAADNSFRFVPQSIAAFGSTVIVEGCDSARNIAWVHAWTVTDGMITQIREYFNTALTVTRIHDSGEIVPARSGAGRLPCVWESSVSGRVGKSVPGLVLAI

SEQ ID NO: 65 - DNA, 953 bp, Glycine max
cattcccaccaacattgattccataaatacatagctttcttccttaatttgaaagtaaagaagcaataccaagtacaatctctctactttcagcgtgcttgatttcacattttgaatgcaattttctaaattttagaaactagtagttataattttcacgtcttaaacgtgtgattctttcattttcgagtttctaaacctcttacgagaaccattcctagtatatgtttacttgtgttccggagctggctaactcacaatcacaagaatgcttggaggaatatgtggaacgcaacacgagagtggtcacagagttatacaaagccctaacctccaaagaccccgagacgctccatgggcttgtgacccaagacttggagtggtggttccacggcccaccatgccatcggcaccacttggtcccctggctcacgggctcctcaccctcctcaaaggctttggttccacaacacatggtgggctttgggccagtggtaattgctgaagggtttgatgatgaccatttggtgtggtgggtgcacgcgtggaccgtcactgctgatgggctcataactcaggtcaaagagtatgtgaacacttccgtgaccgtgactcttttatcacaacaagtgcttccaaatgcttccaagtgtcaatgcatttggcagagtaggctttgtgatgaatctgtgcctggacttattctgccaatctagggtattagaattagatggtggttgggtttcaaaagttcaccatgccacatagtgagtggtgcatgtcacgtagtttatatatgtgcacgtaattgggtctatactgtgagtgtgcttgtttttgtgcaattgtgtgggttttgtgacatttagtaattgtatgttatgctatggtttggggctgttgaaatagtgggtgtttatataaatattaacaacgtatcatcatcttttatt

SEQ ID NO: 66 - protein, 163 aa, Glycine max
MFTCVPELANSQSQECLEEYVERNTRVVTELYKALTSKDPETLHGLVTQDLEWWFHGPPCHRHHLVPWLTGSSPSSKALVPQHMVGFGPVVIAEGFDDDHLVWWVHAWTVTADGLITQVKEYVNTSVTVTLLSQQVLPNASKCQCIWQSRLCDESVPGLILPI

SEQ ID NO: 67 - DNA, 855 bp, Gossypium raimondii
cttttgattgcacaaaaccaaatcatctttgctttgctattttggttcgttttgctaagaactggctaacgctcagcaaaaaatcgtggaggaaaccaacaagaaccaagcggtggttcttgccctctatgaagccttaaacacacgagacgtcaacaccgttcaccaaatccttgctcccgatctagagtggtggttccacggtccacccactcaccagtttttgatgcgcttactcaccggcgcttcatccgacgatcctttccgtttcgaggtcgaccctgttttagtcaccacctttggatcaaccgtcatcgtcgaaggctgtgacaacagccgttcgatctcctgggttcacgcttggactgttcgtgatgggacaatcacccaagtgagggagtatttcaacacttctctcaccgttactcgccttggagactctccaccgtcagcttgcagttcttcgacggcggagattgcgccggtgtattgcccttacgtttgggagagtagcctttccaaccgggtggggaaatcagttccgggtcttgttcttgcaatttagtttcctcctcccacgcgtggttaagataacagatgtgagttccatgagttgagttgggtctggtgttaaaattattgtgtcagaactgtcaatttggtaacttattattattgttgtgttgtgagtgttgttttccaatgcaattggatttagtgaagtgtgtggggtccagcatgagaagagttcctcctcctccttctcattttcagtgtttccattgtctaataaatatctgctatcttcttcactttcttattattgcagatacttctacttcttttctcctaaaa

SEQ ID NO: 68 - protein, 112 aa, Gossypium raimondii
MRLLTGASSDDPFRFEVDPVLVTTFGSTVIVEGCDNSRSISWVHAWTVRDGTITQVREYFNTSLTVTRLGDSPPSACSSSTAEIAPVYCPYVWESSLSNRVGKSVPGLVLAI

SEQ ID NO: 69 - DNA, 920 bp, Helianthus annuus
cgggatcaactcccgggttttgttttcaccaattatccaaaactctctctctctcctaaaccccccaccctaaccactggctaaccctcaagaagctctggaggattccagcaacaagagcgtggtgctccagctctaccatgccctaagctcccgtgacgtcgacaccgtccacaagctcctagcccctgacctcgagtggtggttccatggccctccctctcaccaatatatgatgcgattgctcactggaaccgacaacaacgaagacaccaactatttcaactttgttcctcattccgttgacgcgtttggatccacagtcatcgctgaaggctgcgatcaggaccgtcagattttctggatccacgcctggactgttaactcatctggtataattactcaggtaagagagtatttcaacacgtcacttactgtaacccgttttgggagtaacgggtcgaaacccgtgtccattacctcgctccattgtccctctgtttgggagagtagtctctcgggtcggggcgggaagtccgttccgggtttggtgcttgctatatagtaccgggtcggatattcggatcccctgtggctgctacttgatattgttgtttgtttgttatcgtgtggtttaaataaataaaagaataagtcaaagttggaccagcggatatcctatgggttgaagtaactaccgtggtgacctgcgtcagcgaggatgtagagatcaacggctgagatttgtggggactgtttggttacagctttttattatttgggtttgtttggttgtttattttctgtttggttttttgtttgtttgtgtggtttgtggtttgtaattctgatcaaggatatgggggtactctccgtttcttggttgttttcagttgttttaatgaaaatgctttatattg

SEQ ID NO: 70 - protein, 110 aa, Helianthus annuus
MMRLLTGTDNNEDTNYFNFVPHSVDAFGSTVIAEGCDQDRQIFWIHAWTVNSSGIITQVREYFNTSLTVTRFGSNGSKPVSITSLHCPSVWESSLSGRGGKSVPGLVLAI

SEQ ID NO: 71 - DNA, 582 bp, Helianthus annuus
tggcctcgcaacgggagcgtggtgctctccctctaccacgcgctaacctcacgcgacgttcaactcgtgaccaaactcctagcccctgacctcgagtggtggttccatggccccccgtcccaccagtttatgatgcgattactcaccggaactgataccgtcactgactcttttgaattcgtgcctcggcccattgacgcctttggatctactgtgatcgttgaaggctgcgatcagtcacgtgatatctcttggattcacgcctggactgttgactcgtatgggataattacgcaagccacggagcattttaatacttcgcttactgttactcactttggtagctccaacaaatcggtttctgctaccgggtcgcactgcccttccgcttgggagagtagtttgtcgaatcgggttggaaagtctgttcctggattggttctggctatataactggagctaagttggatgtatgtatgcatctggtttgtgtggtaataagaagcttgtgtggctttggaagtagtgttagttatccgctatgacgatcgaatcctgtatgtggttaagttatgttgatgt

SEQ ID NO: 72 - protein, 107 aa, Helianthus annuus
MMRLLTGTDTVTDSFEFVPRPIDAFGSTVIVEGCDQSRDISWIHAWTVDSYGIITQATEHFNTSLTVTHFGSSNKSVSATGSHCPSAWESSLSNRVGKSVPGLVLAI

SEQ ID NO: 73 - DNA, 771 bp, Helianthus exilis
tcactcctcgggtccttttttcaccaattgtcccaaactctctctcctagaccccccaccctaaccactggctaaccctcaagaagctctggaggattccagcaacaagagcgtggtgctccagctctaccatgccctaagctcccgtgacgtcgacaccgtccacaagctcctagcccctgacctcgagtggtggttccatggccctccctctcaccaatatatgatgcgattgctcactggaaccgacaacaacgaagacaccaactatttcaactttgttcctcattccgttgacgcctttggatccacggtcatcgctgaaggctgcgatcaggaccgtcagattttctggatccacgcctggactgttaactcatctggtattattacacaggtaagagagtatttcaacacgtcacttactgtaacccgttttgggagtaacgggtcgaaatccgtgtccattacttcgctccattgtccctctgtttgggagagtagtctctcgggtcggggcgggaaatcggttccgggtttggtgcttgctatatagtaccgggtcggatattcggatcccctgttgtggctgctacttgatattgttgtttgtttgttatcgtgtggtttattaaattaatagaagaataagtcaaagttggaccagcggatatcctatgggttgaagtaactaccgtggtaacctgcgtcagcgaggatgtagagatcaacggctgagatttgtggggactgtttggttacagcttttca

SEQ ID NO: 74 - protein, 110 aa, Helianthus exilis
MMRLLTGTDNNEDTNYFNFVPHSVDAFGSTVIAEGCDQDRQIFWIHAWTVNSSGIITQVREYFNTSLTVTRFGSNGSKSVSITSLHCPSVWESSLSGRGGKSVPGLVLAI

SEQ ID NO: 75 - DNA, 826 bp, Helianthus paradoxus
attccagcaacaacaagagcgtggtgctccagctctaccatgccctaagctcgcgtgacgtcgacaccgtccacaagctccttgcccctgacctcgagtggtggttccatggccctccctctcaccaatatatgatgcgattgctcactggaaccgacaacaacgaagacaccaactatttcaactttgttcctcattccgttgacgcctttggatccacggtcatcgctgaaggctgcgatcaggaccgtcagattttctggatccacgcctggactgttaactcatctggtattattacacaggtaagagagtatttcaacacgtcacttactgtaacccgttttgggagtaacgggtcgaaatccgtgtccattacttcgctccattgtccctctgtttgggagagtagtctctcgggtcggggcgggaaatcggttccgggtttggtgcttgctatatagtaccgggtcggatattcggatcccctgtggctggctgctacttgatattgttgtttgtttgtttgtttgttaacgtgtggtttaaattaataaaagaataagtcaaagttggaccagcggatatcctatgggttgaagtaactaccgtggtaacctgcgtcagcgaggatgtagagatcaacggctgagatttgtggggactgtttggttacagctttttattatttgggtttgtttggttgtttgttttctgtttggttttttgtttgtttgtgtggtttgtggtttgtaattcagatcaaggatatgggggtactctccgtttcttggttgttttcagttgttttaatgaaaatgcttta

SEQ ID NO: 76 - protein, 110 aa, Helianthus paradoxus; identical to SEQ ID NO: 74

SEQ ID NO: 77 - DNA, 718 bp, Helianthus petiolaris
gcggggccattctccgaccactaaatcagaactggccaccttaaagaccaacctctggagtcggcatccggcaacgggagcgtggtgctctccctctaccacgcgctaacctcacgcgacgttcaactcgtcaccaaactcctagcccctgacctcgagtggtggttccatggccccccgtcccaccagtttatgatgcgattactcaccggaactgataacctcaccgactcttttgaattcgtgcctcggtccattgacgcctttggatctactgtgatcgttgaaggctgcgatcagtcacgtgatgtctcttggattcacgcctggactgttgactcgcatgggataattacgcaagttagggagtattttaatacttcgcttactgttactcactttggtagctcctccaataaaccggtttctgttaccgggttgcattgtccttcggtttgggagagtagtttgtcgaatcgggttggaaagtctgttcctggattggttctggctatataagaacaagattggagcttatgcatctggtttgtgtggttaataacaagtttttgtggttttggaagtagtgttagttatccgttatgaggattgtatcctgtttgtggttaagttatgttgttgatgtaaaatcgtacctttgttctatgatggatttgttttgtgttgatttcccgatgtctatgttttgttacaagat

SEQ ID NO: 78 - protein, 108 aa, Helianthus petiolaris
MMRLLTGTDNLTDSFEFVPRSIDAFGSTVIVEGCDQSRDVSWIHAWTVDSHGIITQVREYFNTSLTVTHFGSSSNKPVSVTGLHCPSVWESSLSNRVGKSVPGLVLAI

SEQ ID NO: 79 - DNA, 856 bp, Helianthus petiolaris
gcggggatcaactcccgggttttgttttcaccaattatatatcccaaaactctctctcctaaaccccccaccctaaccactggctaaccctcaagaagctctggaggattccagcaacaagagcgtggtgctccagctctaccatgccctaagctcccgtgacgtcgacaccgtccacaagctcctagcccctgacctcgagtggtggttccatggccctccctctcaccaatatatgatgcgattgctcactggaaccgacaacaacgaagacaccaactatttcaactttgttcctcattccgttgacgcctttggatccacggtcatcgctgaaggctgcgatcaggaccgtcagattttctggatccacgcctggactgttaactcatctggtattattactcaggtaagagagtatttcaacacgtcacttactgtaacccgttttgggagtaccgggtcgaaacccgtgtccattacctcgctccattgtccctctgtttgggagagtagtctctcgggtcggggcgggaagtcggttccgggtttggtgcttgctatatagtaccgggttggatattcggatcccctgtggctgctacttgatattattgtttgtttgttatcgtgtggtttaaattaatagaagaataagtcaaagttggaccagcggatatcctatgggttgaagtaactaccgtggtgacctgcgtcagcgaggatgtagagatcaacggctgagatttgtggggactgtttggttgcagctttttattatttgggtttgtttggttgtttattttctgtttggtttttgtttgtttgtgtggtttgtggtttgaaattctgatca

SEQ ID NO: 80 - protein, 110 aa, Helianthus petiolaris
MMRLLTGTDNNEDTNYFNFVPHSVDAFGSTVIAEGCDQDRQIFWIHAWTVNSSGIITQVREYFNTSLTVTRFGSTGSKPVSITSLHCPSVWESSLSGRGGKSVPGLVLAI

SEQ ID NO: 81 - DNA, 686 bp, Ipomoea batatas
tacggccggggatcctcaccttttctcaaaggtttatttgttctcttcatctctctctctgtaaatcacacttccctccatttctctctctctctttctctgtatctatctgtttctctctctatatatattttccggtctggctaacattcaggaaactctggaggagaccagaaacaagagggtggtgctcgccctgtatgaagccttgagctctcgagacgtggatttggtccagaaacttctggcctctgacctagagtggtggttccatggtccgccgtcccaccaatttttgatgcgcatcctcaccggcactgctaattccggcgattccttccgatttgagcccctcaaagtcgacgccattggccccactgtcttcgtcgagggccaagacctagctcgcaacatcacctgggtccacgcctggtccgtcacggatgggataatcacccaggtccgcgagtacttcaacacctccctcaccgtcactcgcctcggtaaccagtcacgcgccgccgccgccacctccgccttcacgcccctccactgcccttccgtctgggagagcagcctctccaatcgggttgggaaatccgtcccgggtctcgtcctcgcaatataacccgacccgacccgtttacacccaatccccccaatctctactgcttaacataaataaa

SEQ ID NO: 82 - protein, 109 aa, Ipomoea batatas
MRILTGTANSGDSFRFEPLKVDAIGPTVFVEGQDLARNITWVHAWSVTDGIITQVREYFNTSLTVTRLGNQSRAAAATSAFTPLHCPSVWESSLSNRVGKSVPGLVLAI

SEQ ID NO: 83 - DNA, 697 bp, Ipomoea batatas
aaaggggtggtgctcgccctatatgaagccttgagctcacacgacgtcgttcaggtccagaaactactggcctccgacctcgagtggtggttccatggtcctccttctcatcaatttttgatgcaaatactcaccggcactgctaaattcgataacgcctcttttcaattccttcataagaccattgacgtattcggttccgttgttctcgttgaaggttgtgacccaacccgatctattacttgggttcacgcctggactgttacagatggggtaattacccaggttagggagtatttcaatacctcacttactgtcacccgttttgggaaatcggatatttcctcaattacgactctgcattgcccatctgtttgggagagtagcttacctaatcgggtcggaaaatctgttccgggtcttgtattggctctataagaaacgacccgatttgtgctggcgttgtatcttgtgtctagtaggatgtaagattaacgcggctggtttgggattctgttgctatttggtttgatttggtttgtttttattttttaagttgggatttgtgttctgtttattatttgttgttgtgattgagttaaagaaggggccaatgataattggatatacctttctactcaatagattgtctaattatgtattggtttgcaataaaaagcatattgattggctgttt

SEQ ID NO: 84 - protein, 105 aa, Ipomoea batatas
MQILTGTAKFDNASFQFLHKTIDVFGSVVLVEGCDPTRSITWVHAWTVTDGVITQVREYFNTSLTVTRFGKSDISSITTLHCPSVWESSLPNRVGKSVPGLVLAL

SEQ ID NO: 85 - DNA, 866 bp, Ipomoea nil
atcttcaccttttctcaaaggtttgttctcttcttcctccataagaacaacacttctctctctctctgtatctatctttttctctctctctctgtcttccggtctggctaacattcaggaaactctggaggagaccagaaacaagagggtggtgctcgccctgtatgaagccttgagctcccgcgacgtggatttggtccagaaacttctggcctctgacctagagtggtggttccatggtccgccgtcccaccagtttttgatgcgcatcctcaccggcactgcaaccgccggcgattccttccgatttgagcccctcaaagtcgacgccattggccccaccgtgttcgtcgagggccaagacctgtctcgcaacatcacctgggtccacgcctggaccgtcacggatgggataatcacccaggtccgcgagtacttcaacacctccctcaccgtcactcgcttcggcaaccattccgcctccgccgccgccgccgctatcactcccctccactgcccttctgtctgggagagcagcctccccaatcgggttgggaaatcggtcccgggtctcgtcctcgcaatctaacccgacccgatccattcccataaataaaaaataaaaagcgcgtgtttttatttcgtatgggctgaaggggcaccgtcggatcttgcgtctgcgaggatgtgagatggacggctaggattcgtcgtccctgtttcgtttgacgtttttagtttgtgttttggtttgcgttgcgtgtggagtccgaccggccatgatggtccgacgacgacgacacgcaatatgcgtgtcggatgatacgtacgatgtatctcgtgtttggtttgcaataaactcgtgt

SEQ ID NO: 86 - protein, 108 aa, Ipomoea nil
MRILTGTATAGDSFRFEPLKVDAIGPTVFVEGQDLSRNITWVHAWTVTDGIITQVREYFNTSLTVTRFGNHSASAAAAAITPLHCPSVWESSLPNRVGKSVPGLVLAI

SEQ ID NO: 87 - DNA, 1089 bp, Juglans regia
tgtgttggtcccggggatcggccattacggccggggagcccatctatcgcattaccccctgctctccctccagccctttctgtttcctcctttcctcatctaaaacttgagacccaccgccctagctaggcttaggctagaactggctaactttcaggaaactctggaggaaactgattccagtaatcgaagggtggttctcgccctctatgaagccctgagctcgcacgacgtggccacggtgcaccagatcgtcgcccccgacctcgagtggtggtttcatggtccgccttctcaccagttcttgatgcgccttctgaccggcactgccctcgcttctgccacatctttccgatttgtccctcagtccatcacttccttcgggcccaccgtcctcgtcgagggctgcgaccacgcccgctctatttcctgggttcacgcctgcaccgtcactgatggggtaatcactcaggtcagggagtacttcaatacatccctcaccgtcacgcgcctcggtaactccaactcatcttcaacgctgtcggatttctcttccacgccgtcatcctcatcaacggttgagataacgccgctccattgcccgtccctttgggagagcagcgtctccagccaggtcggaaagtcggtgccgggtctggtcctggcgatatagtactattttctccctatattcctccgatcagctgcagtcgttactattattaaaaataaataaaagtgcacaggtgtcagcccctgattgagtgaatcacttatgggctgagctggattgccgtaaaagatcaagtcggagagatgtaagctccttattaaggtcgtgtatgggtgtgggtttgcttgtttggctggcatcctagtttgtatgtttgcgtgcctgtctgtctgtctgtctgtctttctggttgtcgtgtttagtatcgcggtggtgttggattgatcgtgtgtgaaggacgtggaaaccatgacggtggaatattcgtattggtcatataccgatgcatttcatgtaatctcgtgttttggttgtgcaataaagatatatgctcgtgattgtgatatgatttttct

SEQ ID NO: 88 - protein, 121 aa, Juglans regia
MRLLTGTALASATSFRFVPQSITSFGPTVLVEGCDHARSISWVHACTVTDGVITQVREYFNTSLTVTRLGNSNSSSTLSDFSSTPSSSSTVEITPLHCPSLWESSVSSQVGKSVPGLVLAI

SEQ ID NO: 89 - DNA, 1004 bp, Juglans regia
ggggggccctttctttctgcatcttcctctcactccgtgtccaaaaccttatttaattaagacccaccgcctactgccgagctaggcttggtctagaactggctaactctcaggaaactctggaggaaaccgattccagtaatcaaagggtggttctcgccctctatgcggccctgagttcgcacgacgtggccacggtgcaccagatcgtcgcccccgacctcgagtggtggtttcatggtcctccctcccaccagttcttgatgcgccttctgaccggcactgcccctgcctctgccacatccttccgattcgtcccgcagtccatcacttccttcgggcccaccgtccttgtggagggctgcgaccacgccctctctatttcctggattcatgcctgcaccgtctctgatgggataattactcagatcagggagtacttcaacacgtccctcaccgtcacgcgactccggaactccggtccatcgtcaccgccatcagatttagcttctacgaggtcctcatcatcgacggctgcgatcacgcccctccattgcccgtccctttgggagagcagcgtctccagttggttcggaaagtccgtgccgggtctggtcctggcaatatagtaccatctctctctgtgatcagctgcatccgttactatagtaaaaacaaataaattaaagggtgcgcagtaatcagcccctgattgagtgaaatacttatgggctgagctaaatttccgtattagatcgagtcagagagatgtaaaagctccttattacggtcgtgtttggcatggtttgttcggctttggcatcttggtatgtttgcgtgtgcccgtctgtctttcgggttgtcctgtttagtcgtggtgtctgtcttgattttgtgtgttggtacgtggaaaccataatggtggaacattcctattggttatatcctgacgtatctgtaatctcgtgttttggttgcgtaataaaggtatttgcttgtgctcg

SEQ ID NO: 90 - protein, 121 aa, Juglans regia
MRLLTGTAPASATSFRFVPQSITSFGPTVLVEGCDHALSISWIHACTVSDGIITQIREYFNTSLTVTRLRNSGPSSPPSDLASTRSSSSTAAITPLHCPSLWESSVSSWFGKSVPGLVLAI

SEQ ID NO: 91 - DNA, 663 bp, Lupinus albus
  misc_feature (592)..(592): n is a, c, g, or t
  misc_feature (619)..(621): n is a, c, g, or t
ggcacgagcaatttcaattcccaaaatcacttttttttccttattctacaaaaaccctaaagatctggctaacttttgtgtagaagctgattccagcaatcagaagctggttctaactttatatgaagccttaaactcttcagattcagacaccgtcgtgaaaaccgttgcttcagatcttgagtggtggttccatggtccaccctctcatcaattcttaatgcttcttctcaccggcgaaaccgttaacgatttccgtttcgttccacaatctcttgtatcattcggtaacaccgttatcgtcgaaggttgtgacggtaaccgtaacatatcttgggtgcacgcgtggaccgtaacggatgggataattactcaggtcagagaatatttcaacacttcacttaccgttactcgaattggagaatattctgattctgattccggttcagaatccggttcaagttctgaaccggtttggtttccttctgtttgggaaagtactgtctcgaaccgggttgggaaatcggttcccggtctggtcctggcaatataaaaaaataagattataatttggttggtgacacgtggctanaaagatgttagagacttgtttggtttnnnagtattattaatcttggtgtgtgaagtagtatgggtttattc

SEQ ID NO: 92 - protein, 110 aa, Lupinus albus
MLLLTGETVNDFRFVPQSLVSFGNTVIVEGCDGNRNISWVHAWTVTDGIITQVREYFNTSLTVTRIGEYSDSDSGSESGSSSEPVWFPSVWESTVSNRVGKSVPGLVLAI

SEQ ID NO: 93 - DNA, 537 bp, Limonium bicolor
ctgcatgaattcggcacgatgcctcgtgccgaattctggcacgatgctcttaaccaacgacgaatccactccaccatcgccaccgcagtttgaattctaccctcaatccatcaccgccatcggttctgtcgtcctggcggaatggtgcagtggtaagttcgcttgggttcatgcttggactgtttcatctgatggagtgattacccaagtcagagagtatttcaacacctctgttactgttactcgattccttgcggctcaatctcttcccacggagattgtggctgttgctgctgctgcggcgtcgacgacgacatctaagtcttccagccgttgtcagcgtgtttgggagagtatgctgtcgaatcgggttggaaagtcggttccgggtcttgttctcgcgctctgaatctttggattctcagatattgatcgattgtcggtaagcaattgacgccggtctctgtctggaactgtacaggtctggcgtttgaaaattacgtgtgctctgagtctagaggttaaataaatcccgag

SEQ ID NO: 94 - protein, 134 aa, Limonium bicolor
MNSARCLVPNSGTMLLTNDESTPPSPPQFEFYPQSITAIGSVVLAEWCSGKFAWVHAWTVSSDGVITQVREYFNTSVTVTRFLAAQSLPTEIVAVAAAAASTTTSKSSSRCQRVWESMLSNRVGKSVPGLVLAL

SEQ ID NO: 95 - DNA, 848 bp, Lotus japonicus
ggaccaaactcgaagaagaaatcaccaccattttctcttcataaccaaaaacctctttctcgaactggctaaccctcaagattcctcctccgattccagcaaccagaggctggttctcaccctctatgacgccttgaacgctcgagactccgacactgtcgtcaacaccgttgctccagatctcgagtggtggtttcacggcccaccctctcaccagtttttgatgcgcatgctcaccggcgaggactcctcctcctcctcctccgacaccgacaccaccgccttccgattcgttccgcagtcgctcgcgtcgttcggatccaccgtcatagtcgaaggctgcgacacctcacgcgccatttcgtgggttcacgcgtggactgtctcggatgggataattacccaggttagggagtatttcaacactgccctcactgttactcgcttctccaaatccgggtcgccggagattgtcccggcggagaaccgctccggcagcttcccgtgtgtttgggagagtagcgtctccgatcgggtcaggaaatccgtacccggtttggttctcgctatttaaaaaatattaaaaattaaggaaaattagtagtaagaaagaaataaaggcttgtcgacgtggcggtctgtggttggtttggtttcacacctttacgcgggtgatgtgagaccctgctgctttaggtgtggtggttgattttgagtttgtcgtattttatcttgtttgttagttggtttgggcctttcaagttatgggtgtctccactaggttgtattcttgtgtttttgtaataatgtggtgttttgatgatgcaataaaagtatgtgtggatctt

SEQ ID NO: 96 - protein, 116 aa, Lotus japonicus
MRMLTGEDSSSSSSDTDTTAFRFVPQSLASFGSTVIVEGCDTSRAISWVHAWTVSDGIITQVREYFNTALTVTRFSKSGSPEIVPAENRSGSFPCVWESSVSDRVRKSVPGLVLAI

SEQ ID NO: 97 - DNA, 779 bp, Lactuca perennis
gcgggggagtccgatcccggtccatccttttccgaggctaatatcttacagaactggccaactttcaagaagctctggaggattccggcaacgggagcgtggtgctctccctataccatgcgttaagctctcgcgacgtccaagtcgtccacaaactcttagctcctgatctcgagtggtggtttcatggccctccgtctcatcagtttatgatgcgattgctcaccagaactgataacgaaatcaccgactcctttgaatttgtacctctatcgattgacaccttcggatctacagtcattgtcgaaggctgcgatcaacgccgtgatatttcctggatccacgcctggactgtcaattcgcatgggataatcacacaggttagggaatacttcaacacttccctcactgtcactcggttcgttaactctaccaaacctgtttccgttacttcgctacattgcccttccgtttgggagagtagtctcgctaatcgcgtcggaaaatctgttcctggtttagttctagcaatataaaatacgaatcatatcagtgaataagagcaaatcaaagtcgttttagattttgattttaataaaagtagagctaccgtggtatcctgcatctgagaggatgtaagatattcacggctagtttatgtggttatcagtttcgttttctgctagctgtgtttcggaataagtgtaatacaccatgtggatcctaccctgtttatggtcaatctatttcgttgatataaaatcgtacgtttattttaa

SEQ ID NO: 98 - protein, 108 aa, Lactuca perennis
MMRLLTRTDNEITDSFEFVPLSIDTFGSTVIVEGCDQRRDISWIHAWTVNSHGIITQVREYFNTSLTVTRFVNSTKPVSVTSLHCPSVWESSLANRVGKSVPGLVLAI

SEQ ID NO: 99 - DNA, 781 bp, Lactuca sativa
ttcatggtgttagcagcacggttcatagtgggacccagcatcgagtagttactcgaccctggatggacctgtcggttcccaccaggcaatccagtgatattactattttgccctccccccgaccccaacagcttcggaaatcaattctatttctctctctaaaggtacccacaagacgtcaatttctgaccgaactggctaaccctcaagaagctctggaggattccagcaataagagcgtggtgctccagctctaccatgccctaagctgccgcgacgtcgacaccgtccacaagctcttagcacctgacctcgagtggtggttccatggccctccgtctcaccagtatatgatgcgattgctcaccggaaccgacaacgacaacaccgactccttcgaattcgttcctctttccattgacgcgtttggatctacagtcatcgtcgaaggctgcgatcaggatcgcgaaatctcctggatccacgcctggactgttaactcgtatggcataatcactcaggtacgggagtacttcaacacttccctcactgtcactcgtttcggtactactactactactaactcttccaaatcccgctccattacttcgctccattgtccttctctttgggagagcaccctctctaatcgggtcggaaaatctgtcccgggtttggtattggccatatagtaaaacgggctgatcttctttatattaaataaatacgtgtcgtgtgcttgctttgataaaacataataaagtcaaagtcaagaatttgg

SEQ ID NO: 100 - protein, 209 aa, Lactuca sativa
MDLSVPTRQSSDITILPSPRPQQLRKSILFLSLKVPTRRQFLTELANPQEALEDSSNKSVVLQLYHALSCRDVDTVHKLLAPDLEWWFHGPPSHQYMMRLLTGTDNDNTDSFEFVPLSIDAFGSTVIVEGCDQDREISWIHAWTVNSYGIITQVREYFNTSLTVTRFGTTTTTNSSKSRSITSLHCPSLWESTLSNRVGKSVPGLVLAI

SEQ ID NO: 101 - DNA, 625 bp, Musa acuminata
cttcctttcccttggtgcgtgcgagcgcggcaagagaggcgagagagagagagcgagagccagagtggctcagaccggaactggctaacgagagcggagagagcgtgaaggaccgcaacaagtgggcagtgctcacgctgtatgaggccctgaacgtgcgggacgtggagcgggtgcagcagctgctggcccccgacatcgagtggtggttccatggtccgccggagcaccagcacatgatgcgcatgctcaccggcgcggactacgaggagacaaccgccgccgccgccttccagttcaagcccgagcgagtcgccgccttcggctccaccgtcgtcgccgagggcagcggccccgacgccgacaccgcgtgggtccacgcctggaccatcgccccggatgggataatcacccaggtccgcgagtacttcaacacctccctcaccatcacccgagtcgccgccgactcggcctccaaatccgccgcttcctgctcctcctcttcttcctccgggtcggctcacgggactcccgtgtgggagagcagccgccccgagcgagccgggaagtcctttcctggcctcgtcctggctatctaaatcgacataatcccaaataataagtt

SEQ ID NO: 102 - protein, 120 aa, Musa acuminata
MMRMLTGADYEETTAAAAFQFKPERVAAFGSTVVAEGSGPDADTAWVHAWTIAPDGIITQVREYFNTSLTITRVAADSASKSAASCSSSSSSGSAHGTPVWESSRPERAGKSFPGLVLAI

SEQ ID NO: 103 - DNA, 705 bp, Musa acuminata
gtcgcccaccgagtcgtgagttgttccgagttagagcttcccaagagggagagggagagggagagggggaagggagcggcaccggggctcgtcacgaactggctaacgggaaaggagagagcgtggaggaccgcaacaagtgggcagtgctcacgctgtatgaggccctgaacgcgcgggacgtggagcgggtgcagcagctgctggcccccgacatcgagtggtggttccatggcccgccggagcaccagcacatgatgcgcatgctcaccggcgcggaggaggaggaaaccgcagccgccttcaggttccagcccgagcgagtcgccgccttcggctccaccgtcgtcgccgagggcagagcccccaacgccgcctgggtccacgcctggaccgtcgcccccgatgggataatcacccaggtccgcgagtacttcaacacctccctcaccatcacccgagtcgccgcctcttcggcttcctccaaggaacccgcaggctcgacacactgccttcacctgtggcagagccgccgccccgtccctcccgaaaaatccttccccggcctcgtcctggccatctaagccactacaaacaatcctaagccgtaagcctaatcattctaaataaagaggggtgggtgaaagttccatgggctgagagggaaccctcactccccgttgttgggatctgagtctgtagctg

SEQ ID NO: 104 - protein, 109 aa, Musa acuminata
MMRMLTGAEEEETAAAFRFQPERVAAFGSTVVAEGRAPNAAWVHAWTVAPDGIITQVREYFNTSLTITRVAASSASSKEPAGSTHCLHLWQSRRPVPPEKSFPGLVLAI

SEQ ID NO: 105 - DNA, 993 bp, Mesembryanthemum crystallinum
gattcggcacgagcaaatttcatccctcaagaatggctaaccaccagagagaaccagttagcgctggaggaaaacgaaggagaagcagccaacaaaggggtggtgctcgccctttatgacgccctaaactcccgtgactctaacaaggtctcatctctcctcacccccgacctcgagtggtggttccatggtcccccgtcccaccagtttctgatgctcttgctcaccggtgctgatttgtccccatcatctttccaattcaacccccagtcgatcgtggcctttggatctctggtcctcgccgagggctgcgatcccacccgctcgatctcctgggtccacgcctggaccgtcacggatgggataattactcaggtcagggagtacttcaacacctccgttaccgttactcgtctcggtgctggtaacaacaacactcaatctcagccgtccgatcagattgttccggctgctgctcactcttctcatctccaccattgtcagcccgtttgggagagcagtctcgctaatcgggccgggaaatctgtcccgggcctcattgttgctctctgatcgaatccggcccggtggcgatttgtctttggccaattaggtggtcacacgtcgtcaggtatgggctgaggtggaaaaaaaatactccgtagtagtaactccataattataagataagtgtttgggaatttgtggtgctctgttttcgaagatgtaagctctgcttcaaggtgggtggcgttttggcttccaagtggtttatattttttttttttttgtttatttttactgttttaggctctaaagcttaaagccttaaaggtgtgtttggtttggagtgcttgtgtgtttggtaaagtatttgatgaagaagtggagagggtgttatcacaattgggttcctaattgtaatagtggtaatgaaaattgttatggactacctagtcttttctggcattaaaaaaaaaaaaaaaaaaaaaa

SEQ ID NO: 106 - protein, 119 aa, Mesembryanthemum crystallinum
MLLLTGADLSPSSFQFNPQSIVAFGSLVLAEGCDPTRSISWVHAWTVTDGIITQVREYFNTSVTVTRLGAGNNNTQSQPSDQIVPAAAHSSHLHHCQPVWESSLANRAGKSVPGLIVAL

SEQ ID NO: 107 - DNA, 900 bp, Malus x domestica
  misc_feature (779)..(779): n is a, c, g, or t
cacaattccatctctctttccaaaacctccaccttctctctctaaaacccttactttcactctaaacccgccacagaggcctaggcaagaactggctaactctctggaagctctggaagacactgagtccagcaatcgaagggtggtgctcgccctttatgacgccctgagctcccgtgacgtcgacacggtgctcaagatcgtcgcccccgacctcgagtggtggttccatggtccgccgacccaccagttcttgatgcgcctcctcaccggctcccaaaacgaatcgtttcagttcgtcccccagtccatcgcctccttcggccccaccgtcctcgtcgagggctgcgaccgcgactgctccatttcctgggtccacgcctggaccgtcgccagtggtgtagtcaccggcgtccgcgagtacttcaacacttccctcacagtcacgcgcctcggaaacaacagccacagaaactctcccgcctcctccgctaaatcctcgtccgggttttcctacaaggcgtcgtcgtcggcggccgagattacctcgttccatttcccgtcggtttgggagagcagcgtctccaatcgggccgggaagtccatgccgggtctggtcctcgcaatctaaaagccataatcccctgcggtcctgtgcagtggagtctagtactactaaataagcgggagctgaggtgtcataacctcattcgctgcctagtgctcgttatgagctgaagtcctactgtactcttattcgctttttccttttaagttanattgtgtgtggtgctggtgttgggtgtaaccatggggtcgaggtccttttggtcatatccagacgcggctgtagtggtgttatggtactcttctatttcaataaagacgtgtttgcttaat

SEQ ID NO: 108 - protein, 124 aa, Malus x domestica
MRLLTGSQNESFQFVPQSIASFGPTVLVEGCDRDCSISWVHAWTVASGVVTGVREYFNTSLTVTRLGNNSHRNSPASSAKSSSGFSYKASSSAAEITSFHFPSVWESSVSNRAGKSMPGLVLAI

SEQ ID NO: 109 - DNA, 940 bp, Malus x domestica
gctctttctaaacttccgccttctctctctactttctctctctaaacccttgaatttctcgctctaaacccgccacagaggcttaggcaagaactggctaactctcaggaagctctggaagacactgattccagcaatcgaagggtggtgctcgccctttatgatgccctaagctcccgcgacgtggacacggttcaccagatcgtcgcccccgacctcgagtggtggttccatggtccgccgacccaccagttcttgatgcgcatcctcaccggctcccaaaaagaaccctttcagttcgtcccccagtccttcgcctccttcggccccaccgtcctcgtcgagggctgcgactgcgactgctccatttcctgggtccacgcctggactgtcgccaatggggtaatcaccggggtccgcgagtacttcaacacttccctcaccgtcacgcgcctcggaaacaacacccagaacaactctcccgcctcctcctctaaatcctcgccgtccgggttttcctccaattcgtcgtcgtcgtcgacagccgagattacgtcgttccattgcccgtccgtttgggagagcagcgtctccaatcgggtcggaaagtccgtgccgggtcttgtcctcgcaatctaaaagccataacactaatcccctgcggtcctgtgcagtggagtctaatactactaaataagcgggggctgaggtgtcataacctcattggctgtccggtactcgttatgggctgaactgccgaagtcctatcctaccgtatttctttctcgctttttcatttctctttcttttcttgaaatttcgtttgtgtgtggtgctggtgttgggtgtaaccatggggtcgaggctcttttggtcatatcccgacgcggctgtagccgtgttatggtactcttctatttcaataaagacgtgttttctt

SEQ ID NO: 110 - protein, 126 aa, Malus x domestica
MRILTGSQKEPFQFVPQSFASFGPTVLVEGCDCDCSISWVHAWTVANGVITGVREYFNTSLTVTRLGNNTQNNSPASSSKSSPSGFSSNSSSSSTAEITSFHCPSVWESSVSNRVGKSVPGLVLAI

SEQ ID NO: 111 - DNA, 797 bp, Manihot esculenta
  misc_feature (732)..(733): n is a, c, g, or t
  misc_feature (755)..(756): n is a, c, g, or t
gttcttcatacacatttctctctcttccttgaactctccgctttttctctctctctctctctctctctctctctcttagcttcagtgtaaaagggccgattccgggcttattctcgaactggctaactcacaggaaatactggaagaatcgtcaagaaagaaccaagaggtggttcttgacctctatgaggccttgagatctcgagacgtggacacggtgcaaaagatcctcgcctccgacctcgagtggtggttccatggcccgccgtctcaccagtttatgatgcgccttctcactggtactgacaccgcatcgtcatcatcaggaaaagttggaaaaagctccactgattttgagttcaaccctgtgttcatcagggcctttggatcgatcgtgattgttgaaggctgtgattatagccgctccatttcttggattcacgcgtggactgttacggatgggataattactcaggtgagagagtacttcaacacttctcttactgttactcgtcttggaaaccaagatcaatcagagccatctgattattcatctccgtcttcatcgtcatcttcatctgcggagataacttctgtgcattgcccgtacatttgggagagcaggctcaccaatcgggtcgggaaatcagtgccgggtttggttctggcaatttaatcaataagtgttctgatcaggtgcaggcgttattattataatatagtagtggaatnnaaaaaacgccgcacgtgtctcnnttatgcgaacagagatgtgagtctttaagggcttgtttgtt

SEQ ID NO: 112 - protein, 131 aa, Manihot esculenta
MMRLLTGTDTASSSSGKVGKSSTDFEFNPVFIRAFGSIVIVEGCDYSRSISWIHAWTVTDGIITQVREYFNTSLTVTRLGNQDQSEPSDYSSPSSSSSSSAEITSVHCPYIWESRLTNRVGKSVPGLVLAI

SEQ ID NO: 113 - DNA, 662 bp, Mimulus guttatus
ttcttcttctcccacacttctctctcatattcaggaactggcggcgttaagtcaggaaattctggaggattctctaacgaaaggggtggtgaccgccctgtatgacgccttgaaccgccgcgactcggtggcaatccagcagatcctcgccccggacctcgagtggtggttccacggcccccctacccaccaatttttgatgcgcctcctcaccggcgtccaggaatccaacttccgcttcctcccccacagcatctccgccttcggccccaccgtcctcgccgagggtttcgaccagtcacgctccattgcctgggtccacgcctggaccgtctcccccgatgggataatcacccagctccgtgagtacctcaacacttccctcaccgtcacccgaatcggtaactccgattgcaccaccaccaccaccaccaccaccggcgttgtgtccctgcattgcccctctgtttgggagagtagcctccccgatcgggtcggcaaatccatgccgggtctcgtgcttgtcatttaaaaagatttccattctatcccttcggccacgggctttgtaagtccatttatctatcataaccaaacctatcccccacacctattgcacccaacgatcatagactgcgcgataaaccccgtatccgttccta

SEQ ID NO: 114 - protein, 110 aa, Mimulus guttatus
MRLLTGVQESNFRFLPHSISAFGPTVLAEGFDQSRSIAWVHAWTVSPDGIITQLREYLNTSLTVTRIGNSDCTTTTTTTTGVVSLHCPSVWESSLPDRVGKSMPGLVLVI

SEQ ID NO: 115 - DNA, 893 bp, Medicago sativa
ggggatcatttacaacattccattcacccaatccaaaatcccaaactcagaaatttctagaaaaccactttttttctcgatctggctaactctcaggttaataccgaagacactgattccagcaatcaaaagctggttctcacactatatgactccctaaactctcgagactccgacaccgtggttcgaatcctcgcccctgacctcgagtggtggtttcacggtccaccctctcatcagtttttgatgcgcacgctcactggcgacaccaccgccgtcgataccttccgttttgttcctcagtccataatctccttcggcccaaccgttatcgttgaaggctgcgatacttcacgcgctatttcctgggttcacgcgctgactgttgtggatgggatagttactcaagttagggagtatttcaacacttcccttaccgtcacacacttcgccgggaaagactccggtgagattgtgccggcggccaattccggtggttttacttgtgtttgggaaagtagcgtttctaatcgggtcggtaaatccgtacccggtttggtcctcgctatataaaattattattattaattattaaaataaaataagtgtgctgtgcacgtggcagacggtgattggcttggtatcacttttttcacgggacgtgactttcggtgtttgtttccgtaggagatgtgagaccgcgttgctgtcggtgtcgtgttcaatattgtggtgttttttttcttcccgtttgtttggtttttcttcctagtttgtttggttgtttagtttgatttcttgtgtggaaccattattattatgggtgtgtctcgttggtttgtaatatcgtatttaaatgatgaaataataagaagatcaatgaatcttttttc

SEQ ID NO: 116 - protein, 108 aa, Medicago sativa
MRTLTGDTTAVDTFRFVPQSIISFGPTVIVEGCDTSRAISWVHALTVVDGIVTQVREYFNTSLTVTHFAGKDSGEIVPAANSGGFTCVWESSVSNRVGKSVPGLVLAI

SEQ ID NO: 117 - DNA, 324 bp, Medicago truncatula
atgcgcacactcactggcgataccaccgccgttgataccttccgttttgttcctcagtccgtcatctctttcggctccaccgttattgttgaaggctgcgatacctcacgcgctatttcctgggttcacgcgctgactgttgtggatgggatagtcactcaggttagggagtatttcaacacttcccttaccgtcacacacttcgccgggaaagactccggtgagattgtgccggctaatcccggtggttttcattgtgtttgggaaagtagcgtttctgatcgggtcggtaaatccgtacccggtttggtcctcgcaatataa

SEQ ID NO: 118 - protein, 107 aa, Medicago truncatula
MRTLTGDTTAVDTFRFVPQSVISFGSTVIVEGCDTSRAISWVHALTVVDGIVTQVREYFNTSLTVTHFAGKDSGEIVPANPGGFHCVWESSVSDRVGKSVPGLVLAI

SEQ ID NO: 119 - DNA, 462 bp, Medicago truncatula
atgcctatagagcaagaggatcacaacaagaaattagtaactgatttatacaaagccctaatctccaaagacacaaacacaatgcaacatcttcttgcctcagatttggaatggtggttccatggtccaccatgtcatcgtcactatttggtccctatcctcacaggctcatcatcatcatcatcaatatctcaagaatctttagttcctaatcttataattgggtttggatcagtgattgttgctgaaggctatgatgaaaaaaatatggtatggtgggttcatgcatggtctatttctgatggaattatcactgaggttagagaatatgttaacacttcggtttatgttactaagcttggtttgcattcagaagatgttgttgttggttccagttgtaggtgcatttggcagagtaagctttgtgatggttcggttcctggactcattctcacaatctag

SEQ ID NO: 120 - protein, 153 aa, Medicago truncatula
MPIEQEDHNKKLVTDLYKALISKDTNTMQHLLASDLEWWFHGPPCHRHYLVPILTGSSSSSSISQESLVPNLIIGFGSVIVAEGYDEKNMVWWVHAWSISDGIITEVREYVNTSVYVTKLGLHSEDVVVGSSCRCIWQSKLCDGSVPGLILTI

SEQ ID NO: 121 - DNA, 761 bp, Nicotiana tabacum
ggtccggattcccgggatgacaatctttcttgattatttttctctattattccttattataactgaactggctaacactcaggaaactctggaggaaactcaaaacaaaagggtggtagtagccctatatgaagccttgagctcacacgacgtcgttcaggtccagaacctactggccgcggacctcgagtggtggttccatggtccaccttctcatcagttcttgatgcaaaccctcaccggcactgccaaggacgctttccacttcatccctaagagcattgacgtcttcgggtccattgtactcgtcgaaggctgcgacccgacccgctccattacttgggtccacgcctggactgtggctgatggggtaattacccaggttcgggagtacttcaacacctcgcttattgtgacccgttttgggaagaaaacccaatcggattttgaatctataacgcccctgcattgcccctctgtttgggagagtagcctcgctaatcgggtcgggaaatccgttccgggtctagtcctggctctctagataaaagtgcagtttgtgcttggttctagtatgggctgaagttcttttgctgtttggtttggctttctattttggttttaattttgtttaagtttatttgttgttgtggtcgagttaaccaatgatgattgggagtgggagacccttctacttggtctgtttggtttgcaataaaagtgattttctttggttggttacataacaaaaaaataaaaag

SEQ ID NO: 122 - protein, 175 aa, Nicotiana tabacum
MTIFLDYFSLLFLIITELANTQETLEETQNKRVVVALYEALSSHDVVQVQNLLAADLEWWFHGPPSHQFLMQTLTGTAKDAFHFIPKSIDVFGSIVLVEGCDPTRSITWVHAWTVADGVITQVREYFNTSLIVTRFGKKTQSDFESITPLHCPSVWESSLANRVGKSVPGLVLAL

SEQ ID NO: 123 - DNA, 813 bp, Nicotiana tabacum
catcttatcactacctaattctcagaatctcctcttctcctgtaaaattatacttatattctctcctcttttttcggaactggctaactctcaagaaactctggaagaaactagaaacaaaggggtggtgttcgccctatatgaagccttgagctcacgtgacgttgacaaggtccagaaacttctggcctctgatcttgagtggtggttccatggcccaccttcccaccagtttttgatgcgcatcctcactggcactgccaagtcggacaccgaccttttccagttcattcctcagaccattgacgcctttgggtccactgtactcgttgaaggctgcgatcctgaccgttcaattacttgggttcacgcttggaccgtcactgatgggataattactcaggttagagagtatttcaacacctctcttaccgtcacccgactcggtaacaatactacggatttttcctctattaccccccgccattgtccctctctttgggagagtagtcttcccaaccgggtcggtaagtcggttccgggtctcgtcctggccctttgatttgcttatgggctgaagttcaaggagttatatcttgtgtccgcgaggatgtaagtttaacggctagtttgggggtttccgtcaccgtttgatttgccttgttttatttttatctgcaattttaatttgttagaaagtagtagtgtgctagtggagttaagggaccatgataaatgggagacccttgtattggttatggtgttttgatgaaatatctagtatggcgtgtttggtttgcaataaaagcactt

SEQ ID NO: 124 - protein, 107 aa, Nicotiana tabacum
MRILTGTAKSDTDLFQFIPQTIDAFGSTVLVEGCDPDRSITWVHAWTVTDGIITQVREYFNTSLTVTRLGNNTTDFSSITPRHCPSLWESSLPNRVGKSVPGLVLAL

SEQ ID NO: 125 - DNA, 733 bp, Ocimum basilicum
gcacgaggtttcatcttcataataatatctgttttttttactgaactggctaactctcagttaactctggaggaaacaacaaacaaaggggtggtgctcgccctgtatgaagccttgagctcacacgacgtcgttcaggtccagaaactcctggcctccgaccttgagtggtggttccatggtcctccttctcatcaatttttgatgcaaatactcaccggtactgctaaattcgataacgcctcttttcaatttcttcataaaaccattgacgtattcggctccgtggttctcgtggaaggctgtgacccgacccgatctattacttgggttcacgcctggactgttacggatggggtaattacccaggttagggagtatttcaatacctcacttactgtcacccgttttcggaagaaaaaccaatccgatatttcctctattacgcctctgcattgtccctctgtttgggagagtagcttacctaatcgggtcgggaaatctgttccgggtcttgtattggctctataagaaaattgtgctgccgtttgtcttgtgtctgataggatgtaagattaacacggctggtttgagattctgttgccgtttggtttgattttttatttttttttaagttgggatttgtgtttgtttaattatgattgagttaaagaaggggccaatgaaaagtggatatacctttcgattgttgcctaattatgtaatggtttgc

SEQ ID NO: 126 - protein, 108 aa, Ocimum basilicum
MQILTGTAKFDNASFQFLHKTIDVFGSVVLVEGCDPTRSITWVHAWTVTDGVITQVREYFNTSLTVTRFRKKNQSDISSITPLHCPSVWESSLPNRVGKSVPGLVLAL

SEQ ID NO: 127 - DNA, 907 bp, Prunus armeniaca
catttctgtgttgagaaagctgcccgggtgcttaggctagaactggctaactctcaggaaactctggaagacagtgattccagtaataaaagggtggtgctcgccctctatgaagccctgagctcgcgtgacgtacacaaagtgcaccagattgtagctccggacatcgagtggtggttccatggtccgccgacccaccagttcttgatgcgcctcctcaccggcgaccaaaacgaatcgtttcagttcagtccccagtccttcgcctgcttcgggcccaccgtcctcgtcgaaggctgcgaccgagattgctccatctcctgggtccacgcctggaccgtcactcatgggatagtcacccaggtcagggagtacttcaacacttccctcaccgtaacccgcctcggtaacaacacctctccctcttcctccgctcaatcctcgccgtccagcttctcttccaagtcctcctcatcgacggccgagattacctcgttccattgcccgtccgtttgggagagcagcgtctccgatcgggtcgggaagtccgtgccgggtctggtcctcgcaatctaaagaccacaataatcccctgcgggcccctgtgcagcgggattctacttttggtatttacttaaataagagggtgctgacgtgtaggcaccttatgggctgaatctactgcgaagttgtggtgtcgtagtagaaatgtaagccccttgctaggtgttgtttggtttgtttgtggttgtttttgcattttagtttgtttttggttgtttgtgtttctggttgtggtgttgggtggagccaatggggttgaggaaactcttttggtcatatcctgaagcgtctgtagaattatggtactctcctttttcaataaagacgtgtttgtttaatatcc

SEQ ID NO: 128 - protein, 122 aa, Prunus armeniaca
MRLLTGDQNESFQFSPQSFACFGPTVLVEGCDRDCSISWVHAWTVTHGIVTQVREYFNTSLTVTRLGNNTSPSSSAQSSPSSFSSKSSSSTAEITSFHCPSVWESSVSDRVGKSVPGLVLAI

SEQ ID NO: 129 - DNA, 666 bp, Populus x canadensis
ggcacgaggcctcgtgccgaattcggcacgaggctcctaagcaagactacccccgtccttcttctttatcagctgcattcagcgctttcccaagaactggctaactcacaagaagttctggcagaaatcactgcaccaaagctaccagcatcaacaaaagagaaccaagacgtggttcttgctttctatgaagccttaaagtcacgtgacgtggacacggtacacaagatcctagcacacgaccttgagtggtggttccatggcccgccgtctcaccagtttatgatgcgccttcttactggtgaacaaaaagacaacgacgtgccgtttggcttctcccctatctccatcacctcttttggaaaccttgtggttgttgaagggtgtaatacaagtcgttccatttcctgggtgcacgcttggactgttacggatgggataattacccaggttagagagtacttcaatacttctcttactgttactcgtcttggaaatcaatcacaaccgtctgattttaagtcaaagtcaaattcatcatcaacgcccgagatatccctgttgcattgcccatccatctgggagagcaccctatccaatcgggccggtaagtccgtgccgggtttggttctggctatttgagcggactttgttcaggtgcatccg

SEQ ID NO: 130 - protein, 119 aa, Populus x canadensis
MMRLLTGEQKDNDVPFGFSPISITSFGNLVVVEGCNTSRSISWVHAWTVTDGIITQVREYFNTSLTVTRLGNQSQPSDFKSKSNSSSTPEISLLHCPSIWESTLSNRAGKSVPGLVLAI

SEQ ID NO: 131 - DNA, 926 bp, Populus deltoides
tagtggatcaaagaattcggcacgaggcctcgtgccgaattcggcacgagggtttctcctaagcaaaactaccccccgtccttcttctttatcagctgcattcagcgctttcccaagaactggctaactcacaagaagttctggcagaaatcactgcaccaaagctaccagcatcaacaaaagagaaccaagacgtggttcttgctttctatgaagccttaaagtcacgtgacgtggacacggtacacaagatcctagcacacgaccttgagtggtggttccatggcccgccgtctcaccagtttatgatgcgccttcttactggtgaacaaaaagacaacgacgtgccgtttggcttctcccctatctccatcacctcttttggaaaccttgtggttgttgaagggtgtaatacaagtcgttccatttcctgggtgcacgcttggactgttacggatgggataattacccaggttagagagtacttcaatacttctcttactgttactcgtcttggaaatcaatcacaaccgtctgattttaagtcaaagtcaaattcatcatcaacgcccgagatatccctgttgcattgcccatccatctgggagagcaccctatccaatcgggccggtaagtccgtgccgggtttggttctggctatttgagcggactttgttcaggtgcatccgggagtattgtaatatacatgtagtttggaataaatagggtgcacacgtgtgtgttttgtgtgtcaagagagatgtgagtctcttaggtcttgtttggtttggtttggattgttgaagttgtgtgtgtgaaaatagtaggagtcggcctagatggggagacctatttggttaacactacatttccctgtaatttggtattttaattgtgcaataaagatgtggtactgcgattttctt

SEQ ID NO: 132 - protein, 119 aa, Populus deltoides; identical to SEQ ID NO: 130

SEQ ID NO: 133 - DNA, 632 bp, Populus euphratica
tttctctctggtagctgtttcttctaagcaaaactacccccgtcctcctcctttatcagctgcattcagcgctttcccaagaactggctaactcacaagaagttctggcagaaatcactgcaccaaagctaccaacatcgacaaaaaagaaccaagacgtggttcttgctttctatgaagccttaaagtcacgtgacgtggacacggtacacaagatcctagccaacgatcttgagtggtggttccatggcccgccgtctcaccagtttatgatgcgccttcttactggtgaaaaaaaagacaacgacgtgccgtttgaattctcccctatctccatcacctcttttgggaaccttgtggttgttgaagggtgtaatacaagccgttccatttcctgggtgcacgcttggactgttaccgatgggataattacccaggttagagagtacttcaatacttctcttactgttactcgtcttggaaatcaatcacaaccgtcagattttaagacaaattcatcatcaacgggcgagatatctctgttgcattgcccatccatctgggagagcaccctatccaatcgggtcggaaagtccgtgccgggtttggttctggctatttgagcggactct

SEQ ID NO: 134 - protein, 117 aa, Populus euphratica
MMRLLTGEKKDNDVPFEFSPISITSFGNLVVVEGCNTSRSISWVHAWTVTDGIITQVREYFNTSLTVTRLGNQSQPSDFKTNSSSTGEISLLHCPSIWESTLSNRVGKSVPGLVLAI

SEQ ID NO: 135 - DNA, 726 bp, Panax ginseng
ggccattacggccggggaccattcacctctccttcttaattactctctctctctctctaaaaacgtgaaaagtttgatttgcgccagaactggctaactatcaggaagctctggaggaaaccaaaaaccaaagggtggtactcgccctctatgaagcgctgaccgctcgtgacgtcatcaccgtccacaagctccttgcctccgatctcgagtggtggttccatggcccgccgtcccaccagtttatgatgcgccttctcaccggcactgacacattatcaaccgaatcgttcgaattttccccacaatccgttaccgcattcggaccaacggtcctcgtcgagggctgcgatcaaggccgttcaatctcctggattcacgcctggaccgtaactgatgggataattacccaggtccgggagtatttcaacacttccctcaccgttacccgtttcggaaacgggtcggacttctcgtcttcagttacctctctcaattgcccttctgtttgggagagcagtctgtcggatcttggtggaaaatcagtgccgggtcttgttcttgcgatataaggacttgatctggtgcggccgtaagtaaaatagtatcgtgctattgaataaagaatccaatccttttgcgaatgggctgaagtgccgtagtatcttgtgtctgggaggatataagattaacggttctgattcatttctctcaatttggtgtcgt

SEQ ID NO: 136 - protein, 108 aa, Panax ginseng
MMRLLTGTDTLSTESFEFSPQSVTAFGPTVLVEGCDQGRSISWIHAWTVTDGIITQVREYFNTSLTVTRFGNGSDFSSSVTSLNCPSVWESSLSDLGGKSVPGLVLAI

SEQ ID NO: 137 - DNA, 561 bp, Petunia hybrida
catttttagcatattcatcctctttctttcacaactggctaactcttatcaaactcctactctggaagaaacaacaaacaaaggggtggtgctcgccctatatgaagccttgagctcaaacaacgtagctctggtccaaacccttctgaaccccgacctcgagtggtggttccatggtcctccttcccaccaatatttaatgcacatcctcaccggcaccgataaaaacactttccaattcattcctaccatcattgacgcttttggatccattgtacttgttgaagggtgtgacccgacccattccattacttgggtgcatgcatggactgttactgatggggtaattacgcaagttagagagtattttaacacttctcttactgttacccgttttggaaagtccggttttggaaagtcatctgttacacccttgcattgcccttctgttcgggaaagtagccttgctaatcgggtcgggaaatctgttccgggtcttgtattggctttgtaaaccgggtctgtgtttgacccggtttgttactgcgtggcccccgtgta

SEQ ID NO: 138 - protein, 104 aa, Petunia hybrida
MHILTGTDKNTFQFIPTIIDAFGSIVLVEGCDPTHSITWVHAWTVTDGVITQVREYFNTSLTVTRFGKSGFGKSSVTPLHCPSVRESSLANRVGKSVPGLVLAL

SEQ ID NO: 139 - DNA, 684 bp, Petunia hybrida
  misc_feature (611)..(611): n is a, c, g, or t
ataatttctctcaattataagttatttattcattattccggaactggctaactctagagaaaatactctggaagaaattactagcaacaaaggggtggtgctcgccctatatgaagccttgagctcacgtgacgtgaacaaggttcagaaactactagccactgacctcgagtggtggttccatggtccaccttcccaccaatttttaatgcgcatccttacgggcttggccaaagcggacaacgactttttcgagtttattcctcaaactattgacgtgtcctttggatctattgtactcgttgaagggtgtgatcctgaccgttcgattacttgggttcatgcttggactgttactgatgggataattactcaagttagggagtacttcaacacttctcttaccgttactcggcttacggacttttcctctattgcccccagcacacgacattgtccttctgtttgggaaagtagcctcgctaatcgggttggtaaatcggttccaggtcttgtccttgctctttaaaatctccgaggatgtaagtttaaagacggtttggttaggttaggtttttattttagtctgcaattttatttggtactagtanttgagctgtttaagaagggaccatgatgtatgggagacctttgtactggtttgacaaagtatgtagtaagtag

SEQ ID NO: 140 - protein, 106 aa, Petunia hybrida
MRILTGLAKADNDFFEFIPQTIDVSFGSIVLVEGCDPDRSITWVHAWTVTDGIITQVREYFNTSLTVTRLTDFSSIAPSTRHCPSVWESSLANRVGKSVPGLVLAL

SEQ ID NO: 141 - DNA, 478 bp, Prosopis juliflora
  misc_feature (454)..(454): n is a, c, g, or t
gccttaagctcgggagactccgacaccgttgtcaagctcgtcgcacctgatctagagtggtggttccatggtcctccgtccgaccagtatttgatgcgcatgctcaccggtgaacactcgtcggatactttccggtttgttccccaatcgatcgcctcctttgggccaatcgccatcgtcaagggctgcgaccacagccgcccgatctcgtggattcacgcctgcaccgtcactgatggggtaatcacccaaatcagggagtacttcaacacttccctcaccgttacccgcatcggagattccagctcgtctccgacgtcggagatcactgccgttgcggacgcgcttccttcctgcgtgtgggaaagcagcctctcgcaccgggtcggaaaatccgtgccggggctcgtcctggcgatttaaatacgcgtgacagtacgtgcagcatattaanattcatataataataaaggactgc

SEQ ID NO: 142 - protein, 109 aa, Prosopis juliflora
MRMLTGEHSSDTFRFVPQSIASFGPIAIVKGCDHSRPISWIHACTVTDGVITQIREYFNTSLTVTRIGDSSSSPTSEITAVADALPSCVWESSLSHRVGKSVPGLVLAI

SEQ ID NO: 143 - DNA, 546 bp, Prunus persica
cagtaatagaagggtggtgctcgccctctatgaagccctgagctcgcgtgacgtacgcacagtgcaccagattgtagctccggacatcgagtggtggttccatggtccgccgacccaccagttcttgatgcgcctcctcaccggcgaccaaaacgaatcgtttcaattcagtccccagtccatcgattgttttttgcccaccgtcctcgtcgagggctgcgaccgagattgctccatctcgtgggtccacgcttggaccgtcactcatgggatagtcacccaggtcagggagtacttcaacacttccctcaccgtaacccgcctcggtaaaaatacctctccctcttccttcgctcaatcctcgccgtccagcttcttttccaagtcctcctcatcgacggccgagattacctttttccattgcccgtccgtttgggagagcatcgtcttcgatcggctcgggaattccgtgcccggttttggttcttcaatataaacaccacaattttcctttctcgtccccccgttcccctcggcctccttatt

SEQ ID NO: 144 - protein, 122 aa, Prunus persica
MRLLTGDQNESFQFSPQSIDCFLPTVLVEGCDRDCSISWVHAWTVTHGIVTQVREYFNTSLTVTRLGKNTSPSSFAQSSPSSFFSKSSSSTAEITFFHCPSVWESIVFDRLGNSVPGFGSSI

SEQ ID NO: 145 - DNA, 602 bp, Populus trichocarpa
gtacagtcaaagctttccaagaactggctaactcacaagaaattctggcagaaatcactgaaccaaagccaccaacatcatcaagaaagaaccaagaagtggttcttgctttctatgaagccttaaagtcacgtgacgtggacacggtacacaagatcctagcccacgatcttgaatggtggttccatggcccgccgtctcaccagtttctgatgcgccttctcactggtgaacaaaaagacaacgacgtgccgttcgagttctcgcctctttccatcacctctttcggaaacattgtggttgttgaagggtgtgataccagtcgttccatttcttgggtgcacgcttggactgttacggatggggtaattacccaggttagagagtacttcaatacctctcttactgttactcgtcttggaaaccaatcacagtcgtctgattttaagtccaagtcaaagtcatcatcaacgactgagatttctcctgtgcattgcccatccgtctgggagagtagtctctccgaccggatcggtaagtccgttccgggtttggttctggctatttgagtggactctgatcaggtgcatccggaagtattg

SEQ ID NO: 146 - protein, 118 aa, Populus trichocarpa
MRLLTGEQKDNDVPFEFSPLSITSFGNIVVVEGCDTSRSISWVHAWTVTDGVITQVREYFNTSLTVTRLGNQSQSSDFKSKSKSSSTTEISPVHCPSVWESSLSDRIGKSVPGLVLAI

SEQ ID NO: 147 - DNA, 930 bp, Populus trichocarpa
ccccgtggcctccctgacaaactcaatcggttatcttttctctctggtagctgtttctcctaagcaaaactacccccgtccttcttctttatcagctgcattcagcgctttcccaagaactggctaactcacaagaagttctggcagaaatcactgcaccaaagctaccagcatcaacaaaagagaaccaagacgtggttcttgctttctatgaagccttaaagtcacgtgacgtggacacggtgcacaagatcctagcacacgaccttgagtggtggttccatggcccgccgtctcaccagtttatgatgcgccttcttactggtgaacaaaaagacaacgacgtgccgtttgacttctcccctatctccatcacctcttttggaaaccttgtggttgttgaagggtgtaatacaagtcgttccatttcctgggtgcacgcttggactgttacggatgggataattacccaggttagagagtacttcaatacttctcttactgttactcgtcttggaaaccaatcacaaccgtctgattttaagtcaaagtcaaattcatcatcaacgcccgaaatatctctgttgcattgcccatccatctgggagagcaccctatccaatcgggtcggtaagtccgtgccgggtttggttctggctatttgagcggactttgttcaggtgcatccgggagtattgtaatatacatgtagtttggaataaatagggtgcacacgtgtgtgttttgtgtgtcaagagagatgtgagtctcttaggtcttgtttggtttggattggtttggtttggattgttgaagttgtgtgtgtgtgaaaacagtaggagtcggcctagatggggagacctatttggttaacactacatttccctgtaatttggtattttaattgtgcaataaagatgtggtactgcg

SEQ ID NO: 148 - protein, 119 aa, Populus trichocarpa
MMRLLTGEQKDNDVPFDFSPISITSFGNLVVVEGCNTSRSISWVHAWTVTDGIITQVREYFNTSLTVTRLGNQSQPSDFKSKSNSSSTPEISLLHCPSIWESTLSNRVGKSVPGLVLAI

SEQ ID NO: 149 - DNA, 1016 bp, Poncirus trifoliata
caccagttctctctggtaacccttatccagaatcacaaaacaaattcatttcattttcagtttctctgtttttgttgtttccattttctaaggctatattccgtcaagaactggctaactctcagcagaaaaatccggaagattccgaaaacaagaaccagcgcgtggttcttgctctgtatgatgccttaaaatctcgagacgttgaaacggtacacaagatcctagccccggacctagagtggtggttccatggcccgccgacccaccagtttatgatgcaccttctcaccggcagcaccaccgcatcgtcagcatcgcaaagctccttcgtattcgttcctctctcgatcacatcgttcgggcccattgtcctcgccgagggctgtgatcatagccgtcaaatcagctgggtccacgcctggacggtcgctgatgggataattactcaagtcagagaatacttcaacacttcgcttaccgtcacccgcttcggtaaagacttgtctggtcaaagtcagaggaagaaatcaccaccctctgatttcccatcaacagcggagattaatccggtgcattgcccctccgtttgggagagcagcgtctccaaccgggacggtaaatctgtcccgggtttggttctcgctctctaagcaaaccaaaaaagggaccgagattgatcctgtgcagccgcgtgtagtataatattttactttatcatatataaataaaggctgcacgtgacgtgtgtcgcccgctgtttgggccgtcgcttggagatgtgagtgactgaggccctgggtgggggagtgctttgggttgttttcgcctttatttttgtgtctggctttccgggtttgtttgtttgtttgtatgtttgatatgttggtctttccgggtcggatcatgatgtgtgaacccgaactcggttggttgtatccagctgttgtttatgttgattggtgctttgattatcgaataaaaattggttattttaataaactttgttcttggcc

SEQ ID NO: 150 - protein, 125 aa, Poncirus trifoliata; identical to SEQ ID NO: 32

SEQ ID NO: 151 - DNA, 803 bp, Phaseolus vulgaris
  misc_feature (638)..(638): n is a, c, g, or t
  misc_feature (716)..(716): n is a, c, g, or t
  misc_feature (724)..(724): n is a, c, g, or t
  misc_feature (761)..(761): n is a, c, g, or t
  misc_feature (779)..(779): n is a, c, g, or t
  misc_feature (790)..(790): n is a, c, g, or t
  misc_feature (797)..(797): n is a, c, g, or t
aaacagacattgtttggttgctgccgattctcgaatcgttttattctccaccgaaccccaaacctctttctcgaactggctaactctcaggcaagtgcttcagacgctgattccagcaacaaacggctggtggtagcactgtatgacgccctaagatccggcgactccgccgccgtcgtcaagatcctcgccgccgacctcgagtggtggttccatggtccgccgtcccaccagtttttgatgcgcatgctcaccggcgattccaccgccgaaaccttccgattcgttccgcaatccgttgccgccttcggctccaccgtcatcgtcgagggctgcgacaccgcccgcaacattgcctgggttcacgcctggaccgtcgcggatgggataatcactcaggtgagagagtacttcaacactgccctcaccgtcacccgcttcgaagactccggcgagattgttcccgcgagctccggcgccggccgcttcccctgcgtgtgggagagcagcgtatcgggtcgggttgggaaatccgtgcccggtttggttctggcaatataaataatagcaataaaagataaaaataattaaaaccggtcacgtggttgccgttagtggaataattaaataaaagtggntgtgcacgtggcggtgactgggttactcgattgcagggaaaatgataattgctattgggggtttttccgaaataaaanactggtanaacccggttctggtgtggtggttggggggtccttcanttggtggttggtcaatgngggttccttcncggtttnggcacc

SEQ ID NO: 152 - protein, 106 aa, Phaseolus vulgaris
MRMLTGDSTAETFRFVPQSVAAFGSTVIVEGCDTARNIAWVHAWTVADGIITQVREYFNTALTVTRFEDSGEIVPASSGAGRFPCVWESSVSGRVGKSVPGLVLAI

SEQ ID NO: 153 - DNA, 768 bp, Phaseolus vulgaris
gaagaactcaatcactttacaacattccggagctggcaaactcgagttcacagaaagcatggctacacgatcaagaggatcgcaacaagaaaaccgtaacagacttatacaaagccataacctcaaaggacaccaacacaatgtaccgtcttctggccccagacttggagtggtggttccacggcccaccctcccaccgccaccacctcattcctctcctcactgccaccgccacctcctccccctccaagcctgtgctggttcctgaccacatcgttgggttcggatcagtgaccatcgctgaagggttcgacgagaccaacttggtgtggtgggtgcacgcgtggaccaccaccgccgacggcgtcatcacggaggttagggagtacgtcaacacctccgtcaccgtcaccaggctcggcttccatggctccgacgatgtggttgcttctgccatgtgtcaaagcgtctggcagagcacgctgtgcgatgagtctgttccaggactcattctcgccatctagtgaagtgaagttccaaaggcttggttggttggttggttggttgtgaagttcgctatatatctgtcagtgtagtgttgtgtgacttaggttgaatgaaaccatcttcctgctgttggttgtgccatctttcgttgttctgtgtttgtttagggtttgttgaaaacaatgtggcaggataaataaatgttatgttactaccgtatcatgttccagtttcatgccttttgaagtattactctctctc

SEQ ID NO: 154 - protein, 127 aa, Phaseolus vulgaris
MYRLLAPDLEWWFHGPPSHRHHLIPLLTATATSSPSKPVLVPDHIVGFGSVTIAEGFDETNLVWWVHAWTTTADGVITEVREYVNTSVTVTRLGFHGSDDVVASAMCQSVWQSTLCDESVPGLILAI

SEQ ID NO: 155 - DNA, 627 bp, Ricinus communis
atgtctcaaaacaacacaaattgtaaagttaaggcagccgattcgaggctttttcaagaactggctaactcacaggaaatactggaagaagaatcatcctcaagaaagaaccaacaggtggttcttgccctttatgacgccttgaagtctcgagacgtcgatactgttcacaagatccttgcttctgatattgaatggtggtttcatggcccgccctctcaccagtttatgatgcgactccttaccggtgctgacacatcatcattcaagaaaagcagcagctcttcgacttcttttgaattcaacccagaaatcattagggtatttggctccattgttattgctgaaggttgtgattacacgcgctctatttcttgggtgcatgcttggactgttactgatgggataatcactcaggtcagagagtattttaacacttccctcactgttactcgtcttggcaatcaatctgcgccctctgattattcatctgtggcatcatcgtcttcttcttcgtcgtcatcaccggcgacagagattgcttctgcgcattgcccgtccgtttgggagagtagcttctccaatcgggtcggaaagtcggttccgggtttggttcttgctatttag

SEQ ID NO: 156 - protein, 208 aa, Ricinus communis
MSQNNTNCKVKAADSRLFQELANSQEILEEESSSRKNQQVVLALYDALKSRDVDTVHKILASDIEWWFHGPPSHQFMMRLLTGADTSSFKKSSSSSTSFEFNPEIIRVFGSIVIAEGCDYTRSISWVHAWTVTDGIITQVREYFNTSLTVTRLGNQSAPSDYSSVASSSSSSSSSPATEIASAHCPSVWESSFSNRVGKSVPGLVLAI

SEQ ID NO: 157 - DNA, 615 bp, Ricinus communis
atgtttgaacttttaattgttgatcaaattgtcgcagccgattcgaggctttttcaagaactggctaattcacaggaaatactggaagaagaatcgtcttcaaggaagaaccaagaagtggttctttccctttatgaagccttaaagtctcgagacgtcgatactgttcacaagatccttgcttctgaccttgaatggtggtttcatggcccgccatctcatcagtttatgatgcgcctccttactggtgctgacacatcattatcaaaaattagcaaaaaaacctttgaattcaacccagaaatcattagggtttttggctccattgtcatagctgaagggtgtgattctactcgctctatttcttgggttcatgcttggaccgtgactgatgggataattactcaggttaaagagtacttcaacacttctctcaccgtcactcgccttggtcatcgagatcaatctgaaccgtctgattcttctccatcttcttcttcgtcgtcgtcgtcatcaacggccgagattacttctgtgcattgcccgtccgtttgggagagtagcctctccaatcgggtcggaaagtcggtgccgggtttggttcttgcaatctag

SEQ ID NO: 158 - protein, 204 aa, Ricinus communis
MFELLIVDQIVAADSRLFQELANSQEILEEESSSRKNQEVVLSLYEALKSRDVDTVHKILASDLEWWFHGPPSHQFMMRLLTGADTSLSKISKKTFEFNPEIIRVFGSIVIAEGCDSTRSISWVHAWTVTDGIITQVKEYFNTSLTVTRLGHRDQSEPSDSSPSSSSSSSSSTAEITSVHCPSVWESSLSNRVGKSVPGLVLAI

SEQ ID NO: 159 - DNA, 756 bp, Solanum habrochaites
gcacgaggctttcatcttcataataatatctgttttttttactgaactggctaactctcagttaactctggaggaaacaacaaacaaaggggtggtgctcgccctgtatgaagccttgagctcacacgacgtcgttcaggtccagaaactcctggcctccgaccttgagtggtggttccatggtcctccttctcatcaatttttgatgcaaatactcaccggtactgctaaattcgataacgcctcttttcaatttcttcataaaaccattgacgtattcggctccgtggttctcgtggaaggctgtgacccgacccgatctattacttgggttcacgcctggactgttacggatggggtaattacccaggttagggagtatttcaatccctcacttactgtcacccgttttcggaagaaaaaccaatccgatatttcctctattacgcctctgcattgtccctctgtttgggagagtagcttacctaatcgggtcgggaaatctgttccgggtcttgtattggctctataagaaaattgtgctgccgtttgtcttgtgtctgataggatgtaagattaacacggctggtttgagattctgttgccgtttggtttgattttttatttttttttaagttgggatttgtgtttgtttaattatgattgagttaaagaaggggccaatgataatgggatatacctttcgattgttgcctaattatgtaatgaatggaataaaagcattggatggcgttc

SEQ ID NO: 160 - protein, 108 aa, Solanum habrochaites
MQILTGTAKFDNASFQFLHKTIDVFGSVVLVEGCDPTRSITWVHAWTVTDGVITQVREYFNPSLTVTRFRKKNQSDISSITPLHCPSVWESSLPNRVGKSVPGLVLAL

SEQ ID NO: 161 - DNA, 767 bp, Solanum habrochaites
gcacgaggcctcgtgccgaattcggcacgagggtttggtatataattataacttcattctctcctctttttcaggaactggctaattctcaggaaattctggaagaaaccagaaataaaggggtggtgctcgccctatatgaagctttgagctcacgtgacgttgacaaggtccagaaacttctggcctctgaccttgagtggtggttccatggtccaccttcacatcaatttttgatgcgcatactaactggtactgccaactccgatcactatttcttcaaattcattcctcaaagtattgacgcctttggatctactgtccttgtcgaaggttgcgatcctgatcactctattacttgggttcacgcttggactgttaatgatgggataattactcaggttagggagtatttcaatacctctctcacagtcactcgacttgacaatagtaataataataattgcccttcatcggatttgtcttccattgctgctacacggcattgcccttctctttgggagagtagtttacctaatcgggtgggtaagtcggttccgggtcttgttctcgctctctgagtttcgcgaggatgtaagtttaacggttgatttgggggttttcgtcgcattgttttaattttattatctgcaatttaaatttgggaccatgatgaatgggatatccttgtactggatatggcgttttaatatattatgtgatacgcgatgtatttaaatggcaataaaaacacttgttggtttttg

SEQ ID NO: 162 - protein, 114 aa, Solanum habrochaites
MRILTGTANSDHYFFKFIPQSIDAFGSTVLVEGCDPDHSITWVHAWTVNDGIITQVREYFNTSLTVTRLDNSNNNNCPSSDLSSIAATRHCPSLWESSLPNRVGKSVPGLVLAL

SEQ ID NO: 163 - DNA, 774 bp, Saruma henryi
ggcgcaaacgttcccatctctttctttctcactatctgttctttttctgtttctctctctctttctttcgtttcttcttttaaaattaaggccagaactggctaaccaggaaggaagcagcagcctggaggaggatcaaaacaaaagggtggtccgcgccctttatgaagccttaagtgcaggcgacgttgaaacggtgcaccgcctcctcacccctgacatcgagtggtggttccatggcccaccctcctgccagcatatgatgcgattgctcaccggcgtctccgaatcagaccctttcgatttcgtacccgtctccgtccaagccttcggacccaccgtcctcgctgagggacgcgatccctcccgctccgcctcctgggttcacgcttggaccgtcacgaatggggtagtgacccaggtcagggagtacttcaacacgtccctcctcgttacccgcctcgaaaattctgcaactgcttcttcgtcctcgtcctcgtcctcgtcctcgtcgtttcattgcctcaatcaccctctgtgggagagctctctgttcgatagctccggcaaatccatgcccggtcttgtcctcgctatctgaaacattacagaccggaaatcaaccataacgtgcttatagtttcaagggtgttctagtaattaaaataaaatttgcgtccttgtaatgggttgaaggtttggtaataggggttttatttcgtttttagtcggtctttttccttctttttttcctctggtttgtcttgtgtttgt

SEQ ID NO: 164 - protein, 113 aa, Saruma henryi
MMRLLTGVSESDPFDFVPVSVQAFGPTVLAEGRDPSRSASWVHAWTVTNGVVTQVREYFNTSLLVTRLENSATASSSSSSSSSSSFHCLNHPLWESSLFDSSGKSMPGLVLAI

SEQ ID NO: 165 - DNA, 790 bp, Solanum lycopersicum
ggccattacgggccggggatagttcatcatacctaccttcactcatcttcataatagtatctgtttttgttttactgaactggctaactctcagttaactctggaggaaacaacaaacaaaggggtggtgctcgccctgtatgaagccttgagctcacacgacgtcgttcaggtccagaaactcctggcctccgaccttgagtggtggttccatggtcctccttctcatcaatttttgatgcaaatactcaccggtactgctaaattcgataacgcctcttttcaatttcttcataaaaccattgacgtattcggctccgtggttctcgtggaaggctgtgacccgacccgatctattacttgggttcacgcctggactgttacggatggggtaattacccaggttagggagtatttcaatacctcacttactgtaacccgttttcggaagaaaaaccaatccgatatttcctctattacgcctctgcattgtccctctgtttgggagagtagcttacctaatcgggtcggtaaatctgttccgggtcttgtattggctctataagaaaattgtgctgccgtttctcttgtgtctgataggatgtaagattaacacggctggtttgagattctgttgccgtttggtttgatttttttgttaagttgggatttgtgtttgtttaattatgattgagttaaggaaggggccaatgataattgggtataccttccgattgttgtctaattatgtaatggtttgcaataaaaagctttgtgattggctgtttac

SEQ ID NO: 166 - protein, 108 aa, Solanum lycopersicum; identical to SEQ ID NO: 126

SEQ ID NO: 167 - DNA, 734 bp, Solanum lycopersicum
atcacattaatagttttgtatataaatatctcctcaactggctaattctcaggaaattctggaagaaactagaaataaaggggtggtgctcgccctatatgaagctttgagctcacgtgacgttgacaaggtccagaaacttctggcctctgaccttgagtggtggttccatggtccaccttcacatcaatttttgatgcgcatactaactggtactgccaactccgatcactatttcttcaaattcattcctcaaagtgttgacgcctttggatctactgtccttgtcgaaggttgcgatcctgatcactcaattacttgggttcacgcttggactgttgatgatgggataattactcaggttagggagtatttcaatacctctctcacagtcactcgacttgacaatagtaataataataataattgcccttcatcggatttgtcttccattgctgctacacggcattgcccttctctttgggagagtagtttacctaatcgggtgggtaagtcggttccgggtcttgttctcgctctctgagttccgccaggatgtaagtttttaacggttgatttgggggttttcgtcgcattgttttgattttattatctgcaattttaatttgggaccatgaggaatgggatatccttgtactggttatggtgttttaatatattatgtgatacgcgatgtatttggtttgcaataaaagcacttgttggtttttttg

SEQ ID NO: 168 - protein, 115 aa, Solanum lycopersicum
MRILTGTANSDHYFFKFIPQSVDAFGSTVLVEGCDPDHSITWVHAWTVDDGIITQVREYFNTSLTVTRLDNSNNNNNCPSSDLSSIAATRHCPSLWESSLPNRVGKSVPGLVLAL

SEQ ID NO: 169 - DNA, 503 bp, Solanum pennellii
actgcactggctaactctcagttaactctggaggaaacaaccaacaaaggggtggtgctcgccctgtatgaagccttgagctcacacgacgtcgttcaggtccagaaactcctggcccccgaccttgagtggtggttccatggtcctccttctcatcaatttttgatgcaaatactcaccggtactgctaaattcgataacgcctcttttcaatttcttcctaaaaccattgacgtattcggctccgtggttctcgtggaaggctgtgacccgacccgatctattacttgggttcacgcctggactgttacggatggggtaattacccaggttagggagtatttcaatacctcacttactggcacccgttttcggaagaaaacccaatccgatatttcctctattacgcctctgcattgtccctctgtttgggagagtagcttacctaatcgggtcgggaaatctgttccgggtcttgtattggctctataagaaaattggat

SEQ ID NO: 170 - protein, 108 aa, Solanum pennellii
MQILTGTAKFDNASFQFLPKTIDVFGSVVLVEGCDPTRSITWVHAWTVTDGVITQVREYFNTSLTGTRFRKKTQSDISSITPLHCPSVWESSLPNRVGKSVPGLVLAL

SEQ ID NO: 171 - DNA, 797 bp, Solanum tuberosum
cttctctcatcttcatagctaataatatcatcttctgttttactgaactggctaactctcagttaactctggaggaaacaacaaacaaaggggtggtgctcgccctatatgaagccttgagctcacacgacgtcgttcaggtccagaaactcctggcctccgacctcgagtggtggttccatggtcctccttctcatcaatttttgatgcaaatactcaccggcactgctaaattcgataacgcctcttttcaattccttcataagaccattgacgtattcggttccgttgttctcgttgaaggttgtgacccaacccgatctattacttgggttcacgcctggactgttacggatggggtaattacccaggttagggagtatttcaatacctcacttactgtcacccgttttgggaaatcggatatttcctcaattacgactctgcattgcccatctgtttgggagagtagcttacctaatcgggtcggaaaatctgttccgggtcttgtattggctctataagaaacgacccgatttgtgctggcgttgtatcttgtgtctagtaggatgtaagattaacgcggctggtttgggattctgttgctgtttggtttggtttgtttttattttttaagttgggatttgtgttctgtttattatttgttgttgtgattgagttaaagaaggggccaatgataattggatatacctttctactcaatagattgtctaattatgtgttggcttgcaataaaaagcatattgattggctgtttaaaaacaaaagaaaaactc

SEQ ID NO: 172 - protein, 105 aa, Solanum tuberosum; identical to SEQ ID NO: 84

SEQ ID NO: 173 - DNA, 759 bp, Solanum tuberosum
atcaggcagaggacgagacagaacgcagaaaattccaatctaatcaacatcccataaattattagttggtatataaatattctgttctctctggaactggctaattctcaggaaattctggaagaaaccagaaataaaggggtggtgctcgccctatatgaagctttgagctcacgtgacgttgataaggtccagaaacttctggcctctgaccttgagtggtggttccatggtccaccttcacatcaatttttgatgcgcatcctaactggtactgccaactcggaccactattttttcaaattcattcctcagagtattgacgcctttggatctactgtccttgtcgaaggctgcgatcctgatcgttctattacttgggttcacgcttggactgttaatgatgggataattactcaggttagagagtatttcaatacctctctcacagtcactcgacttgacaataataataattgcccttcatcggatttgtcttccattgctccgtcacgccattgcccttctctttgggagagtagtctacctaatcgggtcggtaagtcggttccgggtcttgttctggctctctgatgtaagtttaacgattgatttgggggttttcgtcactgtttgctttgggttgttttgtttttattttattatctgcaattttaatttgcgaccatgatgaatgggagacccttgtactggttatggtgttgtaatatattatgtgatacggtgcatttggtttcc

SEQ ID NO: 174 - protein, 112 aa, Solanum tuberosum
MRILTGTANSDHYFFKFIPQSIDAFGSTVLVEGCDPDRSITWVHAWTVNDGIITQVREYFNTSLTVTRLDNNNNCPSSDLSSIAPSRHCPSLWESSLPNRVGKSVPGLVLAL

SEQ ID NO: 175 - DNA, 493 bp, Tamarix hispida
gggcagatctagagtggtggttccatggtccgccgtcccaccagtatcttatgcacttgctcaccggtatctccaccgccgacgacagaaccacttcattcaccttcaccgccgactcaggaaccaccgtaggatcatttgtgttggctgaaggctgcaatcctaggcgctcaatcacttgggtccacgcttggacggtgacggatgggataatcactcaggtccgtgagtatttcaacacatctgtcacggtcacccgactcgagggaaacagaggcggcaaccctgttcgtcctgccgggaggaaacagactcctccgtcactcagctctaattctgccattcctccaacttcgtctctaggctccgaaatcgaggggcttccatcgggctgcggcggtcgacatcagcagcagcaatccgtaagggagagcagtcacgccaatcggattggaatttcggttccgggtcttgtcctcgctatctgaccacc

SEQ ID NO: 176 - protein, 145 aa, Tamarix hispida
MHLLTGISTADDRTTSFTFTADSGTTVGSFVLAEGCNPRRSITWVHAWTVTDGIITQVREYFNTSVTVTRLEGNRGGNPVRPAGRKQTPPSLSSNSAIPPTSSLGSEIEGLPSGCGGRHQQQQSVRESSHANRIGISVPGLVLAI

SEQ ID NO: 177 - DNA, 718 bp, Taraxacum kok-saghyz
catttctaattctctctctctctctaaacacgtcaatttctgaccgaactggctaaccctcaagaagctctggaggattccaccaatcagagcgtggtgctccagctctaccatgccctaagctctcgcgacgtcgacaccgttcacaagctcttagcacctgacctcgagtggtggttccatggccctccgtctcatcagtatatgatgcgattgctcaccggaaccgacaacgacgacgctgactccttcgaattcgttcctctttccgttgacgccttcgaatctacagtcatcgtcgaaggctgcgagcaggatcgtgaaatctcctggatccacgcctggactgttaattcgcatggcataatcactcaggtacgggagtacttcaacacttcccttactgtcactcgtttcggtagtaactcttccaaaaccgtcgccattacttcgctccattgtccttctctttgggagagcaccctttccaatcgggtcgggaaatcggtcccgggtttggttctggccatataaaaaggggcggatcccatttgtcttaaatacgttttgtgtggttgaataaaacaataagtcaaagtcaaatttggaagcgcggttttctatgggttgaactagcgtgctattttgcgtctgcgaggatgtaaaacgtgtggctgagattcgtggatactaattgggtctgtttggttattagttt

SEQ ID NO: 178 - protein, 109 aa, Taraxacum kok-saghyz
MMRLLTGTDNDDADSFEFVPLSVDAFESTVIVEGCEQDREISWIHAWTVNSHGIITQVREYFNTSLTVTRFGSNSSKTVAITSLHCPSLWESTLSNRVGKSVPGLVLAI

SEQ ID NO: 179 - DNA, 724 bp, Thellungiella salsuginea
cgaataatcccaccttttttgtttcttctctcgattccggaaactcgccaagaactggatactctggcggattcagagactaagaaccgagacgtggttctgaaactgtatgacgccctgagatctagagacgtcgaatctgttcaccggatcctaaccccagatctggagtattggtttcacggccctccgccgcaccagtttttgatgcgcatcctcaccggagtctctccgccgttcgaattcgttccgctctccgtcgtctccttcggatcgaccgtcatcgccgagggctgcgacgccgctagctccatctcctggatccacgcctggaccgtagcgcatgggataatcactcaggtgagggagtactcgaacacttctctcaccgtcacccgtatcggtaacgttgtcgccggacgctctgctgagattgcgccgtcgcattgtccctccgtgtgggaaagccaactctcgggtcgggctggaaaatccgtcccgggtctggttctggcgatttagaaagagccacgtcagggaataactaaataaaggctgcttacgtgtcagtgtctggttggtttgctgtttatgggttgaaggattttcgtgcggttgagacgcggtgtgtggctgacggctaaggccgcgtttttggctgtcgctaaagttcttcttttgttggattttttttttttttaatttgcttaaaaaatcgtgcttt

SEQ ID NO: 180 - protein, 104 aa, Thellungiella salsuginea
MRILTGVSPPFEFVPLSVVSFGSTVIAEGCDAASSISWIHAWTVAHGIITQVREYSNTSLTVTRIGNVVAGRSAEIAPSHCPSVWESQLSGRAGKSVPGLVLAI

SEQ ID NO: 181 - DNA, 345 bp, Vitis vinifera
atgcaactactcaccggctcatcatcctccgacgatcccttccactttgaccccgtctccatagtggcgttcggatcaactgtcctcgtcgagggctacgaggagcggcggtcggtggcgtgggtgcacgcgtgggtggtgactgatgggataattacccaagtgagggagtacttcaatacttcggttacagtcacgcgactgagcaacacagacaaggcggcggaggggccgtcgacttctacgacggcggctcggtcagttccttgtacgtgtgtttggcagagcaaggtgtgtgagagcatggggaagtcagttccaggactgcttttggctctacagtga

SEQ ID NO: 182 - protein, 114 aa, Vitis vinifera
MQLLTGSSSSDDPFHFDPVSIVAFGSTVLVEGYEERRSVAWVHAWVVTDGIITQVREYFNTSVTVTRLSNTDKAAEGPSTSTTAARSVPCTCVWQSKVCESMGKSVPGLLLALQ

SEQ ID NO: 183 - DNA, 851 bp, Vitis vinifera
atgaccaagaaggcatctccatctgattggttcttccaaactctgacacacggtacaatactgcaaccaaagtactggataactaagacacactggatgaagaaacaaaagagccaaacagaaccttggactccacatccaccagacacgagagattccggtgagttcagcccatatggaaatcgggagtggcagccaaatcactccttctttatttatttattgtatattattatattgcgtacggctgcaagtgatcggcacgtttccttatattgccaggacaagacccggaaccgattttccgacccgatccgagaagctgctctcccagacggaggggcaatggcgcgacggcggcgagggagtcgacgacgacgacgcggcagagatcgacgacgagggtgacgtcgtgaaggaggtgttgaagtactctcggacttgggttattaccccatcagtgaccgtccaggcgtggacccaggcgattgaaccgctgtgatcgcagccctcggcgaggactgtcgaaccgaaagacgcgaaggcgagtggctcgaagacaaatgactcgtcggatgagacaccagtgagcaagcgcatcataaactggtgggaaggcgggccatggaaccaccactcgaggtcggcggcgagaagtcgatggaccgtgtcgacgtcacgtgagcctaaggcttcatatagggcgcgtaccaccctttggttactcgcatcaacctcctccagaatttccggtgagttagccagttctggtagagactccggcgagctaattactagagagagagtaatttcaggagagagaaatggaagaaagagaaagctctgagaga

SEQ ID NO: 184 - protein, 110 aa, Vitis vinifera
MMRLLTGVSSDESFVFEPLAFASFGSTVLAEGCDHSGSIAWVHAWTVTDGVITQVREYFNTSFTTSPSSSISAASSSSTPSPPSRHCPSVWESSFSDRVGKSVPGLVLAI

SEQ ID NO: 185 - DNA, 929 bp, Zantedeschia aethiopica
  misc_feature (747)..(747): n is a, c, g, or t
ggggtctgcttttcttcttcatctccatcgcggggtccctacttacccaatccctccttctccgccttccccttcctcttctttgttctcttctctgtgagctatggttcgcagcagagccacagaggctccccaccggaactggctaaccagggagagataactctggaggagacagaaaacgagcgggtggtccgctccctgtatgacgccctaaacgcgcgagacgtctagacggtgcaccgcctcctcgcgccggacatcgagtggtggttccatggccccccgacctgccagcatatgatgcgcttgctcaccggcgcgtcccgcgacgactccttcgtgttcagccccactaggtacgccatcatcgactccacggtgctcgtcgagggcaacggctgggcgggccgtgcaagcaaccaaccggtgccctttatccacgcctggacggtcactgatgggataatcacccaggtgagggagtacttctacacgtccctcacggtgacccgctgcggcagccccgactcggctggctcctcgccgtcttcctccagcagcagcaaatcgccggcgtcgtcgccggcgtcgcagcaccactgcgtgccgctctggcagagcacgttccccggcggtgccggggagaagtcgatgccagggctggtcctggccatctaatcggcgaacacgcgtctgcccaccccccttcgactggtgacaggtgttctccggcgaagctagctnataaataaaagctggtgatgggctgaagcgaccgagttcgtgcttggctcctcttcatccgaagaataataaatttatagtttgttataaatataatattattatataatagccccttttgtcgggttcgtgtcgcagtaatctatagatgggtatttcctctcatggaagtggtacccatc

SEQ ID NO: 186 - protein, 126 aa, Zantedeschia aethiopica
MMRLLTGASRDDSFVFSPTRYAIIDSTVLVEGNGWAGRASNQPVPFIHAWTVTDGIITQVREYFYTSLTVTRCGSPDSAGSSPSSSSSSKSPASSPASQHHCVPLWQSTFPGGAGEKSMPGLVLAI

SEQ ID NO: 187 - DNA, 788 bp, Zingiber officinale
cgccgctcgcccagaaccgccgaggccgcctactgagttcgccgcttgcgcagcgagagggaagaaggaagagggagacagagagagccgagggggctcgaccggatctggctaacgagaacgcagaggagagcgcgggggaccgcaacgagcggcaagtgctcgcgctgtatgaggccctgaacgcgcgcgacgtggaccgggtgcagcagctgctcgcccccgacctcgagtggtggttccatggcccgccggagcaccagcacatgatgcgcatgctcaccggcgctgacgacgaagccgctgccgagttccgattcgtccccgaccgagtcgccactttcggctccaccgtcgtcgccgagggcaccggccccggcgccgcctcctgggtacacgcctggaccgtctccccggatgggataatcacccaggtccgggagttcttcaacacctccgtcaccgtcacccgcttcgccgctgactcaaccaccaagccctcggtttcgcctggaccgactcactgtctgcccgtctggcagagccgccgcgacaagtcctttcctggactggtcctcgcgatttagacgcaattaatcctaatcacgacatattaattagcgatatatatcaattaatgggctgataattaagcttagtgtgtggtttgcttctattacttaagtttttaattaaagatgaagatggaaggattcatgtcatcctttgtgtgttcgtcattgtcttatatatcgaataaaagatgtctctgtctgcttaaaaaaaag

SEQ ID NO: 188 - protein, 106 aa, Zingiber officinale
MMRMLTGADDEAAAEFRFVPDRVATFGSTVVAEGTGPGAASWVHAWTVSPDGIITQVREFFNTSVTVTRFAADSTTKPSVSPGPTHCLPVWQSRRDKSFPGLVLAI

SEQ ID NO: 189 - DNA, 892 bp, Zingiber officinale
gcacgagggttaaccgagcccacccaccgagcgcaccgcttccgcagcgagagggaaagagagagggaggtcgcgagagagccgagggggctcgtccggagctggctaaccatagcgcaggagagagcctggaggaccgcaacaagtggcgagtgctcgccctgtatgaagccctgaacggtcgcgacgcggaccgggtgcagcagctgctcgcccccgacatcgagtggtggttccatggcccgccggagcaccagcacatgatgcgcatgctcaccggcgctgacgacgacaccgccgccgagttccgattcttccccgaacgagtcgccgccttcggctccaccgtcgtcgccgagggcaccggccccggcgccgccacctcctgggtccacgcctggaccgtctccccggatgggataatcacccaggtccgggagtacttcaacacctccgtcaccgtcacccgagtcgccgctgactcgccgcccaagccctcggtttcgcccaaggactcgcccaggccgactcactgcctgcccgtgtggcagagccgcagccgcaagtcctttcccggactcgtcctggcgatctaaacataagtaatccgaatcattaagtaaagcctaattaatcaatcttaatcaccgaggtgaaggcttaatcaatatatgcatgggctgataaggtcactgtcattcgagtcctaattaagagttaagtctgtggtttgctttaattatcatagttttaataggtaattaagatgaaggagaagcgtagaggaatcatgtcatccttccttcctccttcagtagctgatgatgatgatgctcatgtgtgtttatcattctcttatatattgaataaaagatgcttgtgtgcttgcttt

SEQ ID NO: 190 - protein, 111 aa, Zingiber officinale
MMRMLTGADDDTAAEFRFFPERVAAFGSTVVAEGTGPGAATSWVHAWTVSPDGIITQVREYFNTSVTVTRVAADSPPKPSVSPKDSPRPTHCLPVWQSRSRKSFPGLVLAI

SEQ ID NO: 191 - DNA, 647 bp, Arabidopsis lyrata
acactacacaaaaataagacctttcacttcaaaacctatcctgttctaagtctgaaataataaatttacaaatggaagcacacaacgtagagatatcgacaagacttaccccagaaatgaaaaaccagagaaccatagagttactctacaaagcgttgcagcaaggagacacctcgacggtgaccaaagtggtggccagtgacgtggaatggtggttccatggaccgcaccattgtcaacacatgatgaggctgctaacaggggaacgacggagccaggtttcgttcaggtttgagccaagcagtgtacaagtagtggtgcctggtcatgactgcgtgattgcagaagggtgggagggttcacaagtgtactgggttcacgtgtggaagttgaaagacggagtggtcacggagctaagagagtatttcaacacatggctcactgttacagactacagtcttggagcaataggatgggacatggggcgttgtacggtttgggagagcgtaccaagggacctggctcgtggatcgttgcctagcttgctgttagctatttaactatatgactaaagagtaaattaagtaacacagtttgtgtctggtgggtttctagacttttatgattgtctacttattttcaggttc

SEQ ID NO: 192 - protein, 162 aa, Arabidopsis lyrata
MEAHNVEISTRLTPEMKNQRTIELLYKALQQGDTSTVTKVVASDVEWWFHGPHHCQHMMRLLTGERRSQVSFRFEPSSVQVVVPGHDCVIAEGWEGSQVYWVHVWKLKDGVVTELREYFNTWLTVTDYSLGAIGWDMGRCTVWESVPRDLARGSLPSLLLAI

SEQ ID NO: 193 - DNA, 757 bp, Arabidopsis thaliana
taatgattttattttgactgatagtgacctgttcgttgcaacaaattgatgagcaatgcttttttataatgccaactttgtacaaaaaagcaggcttaaacaatggaagcacacaacgtagagatatcaacaagacttaccccagaaatgaaaaaccagggaaccatagagttactctacaaagcgttgcagcaaggcgacacttctacggtgaccaaagtggtggccagtgacgtggaatggtggttccatggaccgcacgattgtcaacacatgatgaggctgctaacaggggaacctccgaggcaggtttcgttcaggtttgagccaagcagtgtacaagtagtggtgcctggtcatgactgcgtgattgcagaagggtgggagggttcacgcgtgtactgggttcacgtgtggaaattgaaagacggagtggtcactgagctaagagagtatttcaacacatggctcactgttacagactacagtcttggagcagtaggatgggacatggggcgttgtacggtttgggagagcgtaccaagggacctggctcgtggttcgttgcctagcttgttgttagctatttaactacccagctttcttgtacaaagttggcattataagaaagcattgcttatcaatttgttgcaacgaacaggtcactatcagtcaaaataaaatcattatttgccatccagctgatatcccctatagtgagtcgtattacatggtcatagctgtttcctggcagctc

SEQ ID NO: 194 - protein, 162 aa, Arabidopsis thaliana
MEAHNVEISTRLTPEMKNQGTIELLYKALQQGDTSTVTKVVASDVEWWFHGPHDCQHMMRLLTGEPPRQVSFRFEPSSVQVVVPGHDCVIAEGWEGSRVYWVHVWKLKDGVVTELREYFNTWLTVTDYSLGAVGWDMGRCTVWESVPRDLARGSLPSLLLAI

SEQ ID NO: 195 - DNA, 772 bp, Brassica napus
gacatgcatacataaaagaaaaacgtttctccttggaaccatatctgttgttctaagttccaagaaagaaaaataaacacaaatggaagcacacaacgtagagcctttgacaacccctgaaatgaaaaaccggggaaatatagagttactctacagagctttgcagcaaggcgacgcatcgacggtggccaaattggtggccagtgacgtggaatggtggttccatggaccgcacaattgtcaacacatgatgagactactaacaggggaaccaccgagccaggtttcgttcaagttcgagccaagcactgtacaagtagtggtgcctggtcatggctgcgtcatagcagaaggatgggagggttcacaagtgtactgggtccacgtttggaagttgaaagacggagtggtcactgagctaagggagtatttcaacacatggatcactgtcacggattacagtcgtggggcaataggatgggacatggggcgttgcacggtttgcgagagcgtaccaagggatctacctcgtggttcgttacctagcttgctgttggctatttaactgtgtagactaaagtaaaacacagttgtatctggtggtttactctttacctagtaaattaaaaaaaaaagccttatgaatttatgatgttataaacagtagtgtgtttatgaagcgactagctagcaaccaaaaatagttattgtatatatgtgtagggttctttcttgtccttcttataaaattggtctattatttttaaggttt

SEQ ID NO: 196 - protein, 160 aa, Brassica napus
MEAHNVEPLTTPEMKNRGNIELLYRALQQGDASTVAKLVASDVEWWFHGPHNCQHMMRLLTGEPPSQVSFKFEPSTVQVVVPGHGCVIAEGWEGSQVYWVHVWKLKDGVVTELREYFNTWITVTDYSRGAIGWDMGRCTVCESVPRDLPRGSLPSLLLAI

SEQ ID NO: 197 - DNA, 597 bp, Brassica oleracea
acgtttctccttggaaccatatctgttgttctaagttccaagaaagaaaaataaacacaaatggaagcacacaacgtagagcctttgacaacccctgaaatgaaaaaccggggaaatatagagttactcgacagagctttgcagcaaggcgacgcatcgacggtggccaaattggtggccagtgacgtggaatggtggttccatggaccgcacaattgtcaacacatgatgagactactaacaggggaaccaccgagccaggtttctttcaagttcgagccaagcagtgtacaagtagtggtgcctggtcatggctgcgtcatagcagaaggatgggagggttcacaagtgtactgggtccacgtttggaagttgaaagacggagtggtcactgagctaagggagtatttcaacacatggatcactgtcacggattacagtcgtggggcaataggttgggacatggggcgttgcacggtttgggagagcgtaccgagggatctagctcgtggttcgttacctagcttgctgttggctatttaactgtgtagactaaagtaaaacacagttgtatctggtggtttactctttacctag

SEQ ID NO: 198 - protein, 160 aa, Brassica oleracea
MEAHNVEPLTTPEMKNRGNIELLDRALQQGDASTVAKLVASDVEWWFHGPHNCQHMMRLLTGEPPSQVSFKFEPSSVQVVVPGHGCVIAEGWEGSQVYWVHVWKLKDGVVTELREYFNTWITVTDYSRGAIGWDMGRCTVWESVPRDLARGSLPSLLLAI

SEQ ID NO: 199 - DNA, 697 bp, Cryptomeria japonica
tattaccatatcatagaacatttccacagattccagcttggcacacatcctaaacatggttgctaaaagcgtaatctcacacctccaagagggctaaagaccccaccagaacgtgaaaaccactcatacaataaaagagtatatccctgtatttctacttctcagcccaatccacgtacgcaaaacccactaacagcctacatttctaaagaaccgaaatcacccaaagagtctacatctctgtaacaactgcaacaccacacaaagctttgataattatttagggaaaaggcaatccaaagacgattttatcaaattgcgaggacgagcccgggcatcgattcaccgtcagatttgcccaattcactctgccacagtggccggcaaacagaagattttccggatgaggaagaaggagggttaaaatctgtgacgacaagggaagtattgaaatactcacgaacttctgtagctatcccattctccacagtccagacgtgaacccagtacagggattcacccagataaccttccacaaataccttgtcgccgacggcggttaaagtatccgggcgaaatgagaaaccggtgtggtgagaaaggcctgtgagcaagcgcatcaaatactcacagtcgggagggccgtgaaaccaccactccaaatcgggggccaaaatgctctgcactgcccgtgcgt

SEQ ID NO: 200 - protein, 102 aa, Cryptomeria japonica
MRLLTGLSHHTGFSFRPDTLTAVGDKVFVEGYLGESLYWVHVWTVENGIATEVREYFNTSLVVTDFNPPSSSSGKSSVCRPLWQSELGKSDGESMPGLVLAI

SEQ ID NO: 201 - DNA, 519 bp, Citrus sinensis
ccacgcgtccgaatgatgaaatgcagaacgtggccaaatatttggctagtgacttggagtattggtttcatggcccaccaacatgccagcatatggtgaggttgctgaccggagaatcaagcaaagcgacgttcaagttcgagccgcgaagcgtggaggtggtgggggattgtgtgatagctgagggctgggaaggagctccagcttactgggtgcatgtgtggactgtgaatgtgaaagatggcttgatcactcaatttagagagtattttaatacatggctcactgtcaaagatttgaggccaccgcgttgggagatcagagtcagacatgaacggaacactttgtggcagagccagccgagggatcttgctcgccgctcattgcctagccttttgctcaccatttaggtttttgatgctgttgttgttgcatggaaatgtagctagctagctttggttagctggctagctttggaaataactgtaaaatttaatgtttaagtatattttgcatgtg

SEQ ID NO: 202 - protein, 129 aa, Citrus sinensis
MQNVAKYLASDLEYWFHGPPTCQHMVRLLTGESSKATFKFEPRSVEVVGDCVIAEGWEGAPAYWVHVWTVNVKDGLITQFREYFNTWLTVKDLRPPRWEIRVRHERNTLWQSQPRDLARRSLPSLLLTI

SEQ ID NO: 203 - DNA, 738 bp, Centaurea solstitialis
ttggcggggatcttacatagaaacatcatctccctcctaaatgaatcaaatcgtcgaaaaccaacaagaaacccaaaaccaagccaccgtcgaagttctctacaaagcgttggcccatggagacaccaaaacggttgccggaagtctagccggcgacctggagtggtggtttcacggccctcaaaactgccatcacatgatgcgcatgctcaccggggaggcgccccacacggagttcaagttcgaaccccgaagcattacggccatcggcggcgacatggtggtcgtcgaggggtacgagggcgcaaacgtatactgggtgcacgcttggaccttgaaagacgggttgatcacccggttccgagagtatttcaacacgtggctcacggtgaaggagttgagggtgagacggtccaccttgtggaggagccaacctcgggaccttttccgccgctcgttgcccggactcatgcttgccatttgatccgtcgcggctgttagcgacggatccggttttttttagcgacggagaatttcgtcgctaaaggccttttcgtttatagtggtgccattaatgttaattaaatatttattaaaacttaaaagtatcttgttgaatgtgtttttgaaaactgtggttatgtggtttttgaggcggttgatctttctgccatggttaattaattgtgataaattttaggtctttttaattgttatggtttctaaaaagttttttag

SEQ ID NO: 204 - protein, 147 aa, Centaurea solstitialis
MNQIVENQQETQNQATVEVLYKALAHGDTKTVAGSLAGDLEWWFHGPQNCHHMMRMLTGEAPHTEFKFEPRSITAIGGDMVVVEGYEGANVYWVHAWTLKDGLITRFREYFNTWLTVKELRVRRSTLWRSQPRDLFRRSLPGLMLAI

SEQ ID NO: 205 - DNA, 650 bp, Closterium peracerosum
ctgttttcctcgcctttccctctaagctctctccgttcatcccgttttttcaataacgtccgagctggagtcgcggaacctcagtattgtcagggagctttatgccgctctcggatctggcgacctgctgagagcccgagcgcgcttggcggaggacgtggactggtggttccatggtcctaaagctcgccagctgcgttgcatgcaatttctgtcgctgattgtcggcgaggtcgattctgatggtgtgaagttcatgcccgtcgatgtgactgccaagaacgacaaggttatttccgagggtgtcagcgtcgtgaggactcgtcgtggagcgcttgtggatgtggcgtgggtccacgtgtggacgctgtcgcccgccagcggcagagtgactggtctccaagagttcgtcaacactgctgtttccgcgactgtgcttggacctgtctcgggctcgctgagtgcgctgcctgcggcttcatgccgcgaggctatggcttccggctcgaagcttggtgctagcgctgtagcttctagcgggcttcaagtctgggagtctcgcctgtggcgtgagcagaagtcttctttgcctggtctcatcctcaccctttgagttcagctagttctgaagtggttgagtgaggatgtct

SEQ ID NO: 206 - protein, 136 aa, Closterium peracerosum
MQFLSLIVGEVDSDGVKFMPVDVTAKNDKVISEGVSVVRTRRGALVDVAWVHVWTLSPASGRVTGLQEFVNTAVSATVLGPVSGSLSALPAASCREAMASGSKLGASAVASSGLQVWESRLWREQKSSLPGLILTL

SEQ ID NO: 207 - DNA, 564 bp, Festuca arundinacea
ggcacgaggtggttccatggcccgcccgcgcaccagcacatgatgcgcgtcctcaccggcggggcctcctccttccgcttcgcgccgcgcaccgtcgaggccttcggctccaccgtcatcgccgagggcgcctccgccgccggcgaggggaaggcggcctactgggtgcacgcctggacggtgggatccgatggggtgatcacccagctgcgcgagtacttcaacaccgacctcaccgtcacgcgcctcgccgccgcggccgcctccaagtgcgtctggcagagccgccgccccgacagcgcccgcaactccctcccgggcctcgtcctcgccctctagccaatccgtccgacttggatgcatgggctgacgtttgcttaatttcttccctgtctggattgctgtcgttagttaatttgcgtgtctggtactactactgcccgagtcgccggtgatcgatggcgacgcggcggcgtcatggaggctgcaccttcgcggctgctacctgcatgccgttgctgttatggtcgaataataaaggaatttggtttgcattaaaagggg

SEQ ID NO: 208 - protein, 99 aa, Festuca arundinacea
MMRVLTGGASSFRFAPRTVEAFGSTVIAEGASAAGEGKAAYWVHAWTVGSDGVITQLREYFNTDLTVTRLAAAAASKCVWQSRRPDSARNSLPGLVLAL

SEQ ID NO: 209 - DNA, 676 bp, Fragaria vesca
cataagcacacgaagagttagagcaactcattcatttccatcttctaagctcccaaaatgcaggacaacaaggctattgtggaggctttgtacaaggcgttggcccaaggccaaaccgagacagtggcgaaggttttagctactgacctggaatggtggttccatggtcctccgaagtgccagcacatgatgaaggtgctgacaggggattccggtcacgttggcttcaagttcgagccgagaagcgtaacggagattggtgactactgtgttattgctgagggctgggaaggagctcaggcttactgggttcatgtgtggacgatcaaggatggtttgatcactcagttcagggagtatttcaacacgtggctgactgtgagggatctgaagccgctagggtggaaggagagtaagagcttcactgtgtggcagagcatgccaagggacctgttccaccgttctttgccaagccttctgctagctatttagtgtctaatttgagtaagactgtgagactatatatgttgttgtacttaattaggaagaaaaatatgaaaatattagagaaaaaataagggtgctatagttgtacgtggttgaaaactcttgtatcaacaatgaaatggcaaaagatggccatcttgctatgttgaacattgacgtatgattaatg

SEQ ID NO: 210 - protein, 144 aa, Fragaria vesca
MQDNKAIVEALYKALAQGQTETVAKVLATDLEWWFHGPPKCQHMMKVLTGDSGHVGFKFEPRSVTEIGDYCVIAEGWEGAQAYWVHVWTIKDGLITQFREYFNTWLTVRDLKPLGWKESKSFTVWQSMPRDLFHRSLPSLLLAI

SEQ ID NO: 211 - DNA, 1006 bp, Glycine max
actctcaaattaaacttcccatatcaaaatgaagcacatatctagctccattgaaatttcagaaatgggagcagagaggcacgagaaagaggaaatgcataacaaggcaactgtggaagcactctacaaggcccttttagggcaaggccaaatggacacggttgcaacaaacatgctagcaagtgacctcgagtggtggttccatggcccccctcagtgccagcacatgatgagggtgctcaccggagagaccaccctcgacaacaacgggttccggttcgagccaaggagcgtcaccgccatcggcgattgcgtgatcgccgaggggtgggaaggcaaggcctactgggtgcatgtttggaccgtgaggaatggccttatcacgcagtttagagagtacttcaacacatggcttgtggtccgggacttgaggtctcaaaggtgggaaaacaagcttgacaacatgacattgtggcaaagccagccgcgtgatctatatcgtcggtccctgccaggacttgtgctagccatttagctacaagagagaaatgctagcaatgtactaaaaaaaaaacagagaaattattatatagactaagaccatagtgtgtttgtaatcctgatcaatctaaatgtgacaaaattaagttttattaactctgtcacgttcagattgatcagaaccatagacatgtagtagtggtcatcgactatacaataaattctccataagatgaaatttatgtgaggtttattagttttgtttaaattaagtgtgttattatttaccaaaaccttcatgaatttgatccaataagggaaagtgttttgaaaagagtatgttgatggtataggtcttgggtgaagttcaaggatgtgaaattgtgggcaaaataatagcttgggatgtaacctttgcagggttgtgtacctgtggtcaactcaaccacattgagttttggtacatatttggtttgtgtaactgattaatagaaaatgacggtcg

SEQ ID NO: 212 - protein, 168 aa, Glycine max
MKHISSSIEISEMGAERHEKEEMHNKATVEALYKALLGQGQMDTVATNMLASDLEWWFHGPPQCQHMMRVLTGETTLDNNGFRFEPRSVTAIGDCVIAEGWEGKAYWVHVWTVRNGLITQFREYFNTWLVVRDLRSQRWENKLDNMTLWQSQPRDLYRRSLPGLVLAI

SEQ ID NO: 213 - DNA, 522 bp, Glycine max
gtgcaaccatttcctaaaacacaagcctagaagcataaatttcacacaaaaaaaattcaaagcatggaggatcatcaaaaggtggagatgcaaaacaaggcaagagttgaagtgctctacaaggcactattagggcaaggaacaatggacaatgtggccaaattgctagcaagtgaccttgagtggtggttccatggccctcctcattgccaccacatgatgaaggtgctcacaggggaaacagatcacaccaagggcttccggtttgagccgaggcgagtcacagccgtcggagactgcacgatcgctgagggctgggagggcaaggcgtattgggtgcacgtttggaccctaaaaaatggcctcataactcagtttagagagtacttcaacacatggcttgtggtgagggatttgaggcctccaaggtgggaagatagcaaagatagcatgacattgtggcaaagccagcctcgtgatctctatcaccggtcactgccagggcttgtgttaactatttag

SEQ ID NO: 214 - protein, 152 aa, Glycine max
MEDHQKVEMQNKARVEVLYKALLGQGTMDNVAKLLASDLEWWFHGPPHCHHMMKVLTGETDHTKGFRFEPRRVTAVGDCTIAEGWEGKAYWVHVWTLKNGLITQFREYFNTWLVVRDLRPPRWEDSKDSMTLWQSQPRDLYHRSLPGLVLTI

SEQ ID NO: 215 - DNA, 492 bp, Glycine max
atgaagaccatccccggcagcaaggccgagccggagaaactctccggcacggcagcggatcacgaaaaccgcaaccgggagacggtgaaaatggtgtacaaggcattgcgtgacggcgacacggagaagctggcgaaggtggtgagggtggagttggaatggtggtaccatggacctcctcactgccagcacatgaagaaagtgttgaccggggagtcaacggcgacgcaaaaggctttcaagtttaggcctcggaggatcagggccgtcggtgaccgcgtgatggttgaagggtgggagggggcgggggagtactgggtccacgtgtggaggctcaagcacgggattattgcccagcttcgtgagtatttcaacacgttgatcacggtggtgcttcgggttttggaggacggtgatgaggctcggttgtggcggagcaccgaccgggttcgggttcaagggtcgttaccggatattgtgctttccatttga

SEQ ID NO: 216 - protein, 163 aa, Glycine max
MKTIPGSKAEPEKLSGTAADHENRNRETVKMVYKALRDGDTEKLAKVVRVELEWWYHGPPHCQHMKKVLTGESTATQKAFKFRPRRIRAVGDRVMVEGWEGAGEYWVHVWRLKHGIIAQLREYFNTLITVVLRVLEDGDEARLWRSTDRVRVQGSLPDIVLSI

SEQ ID NO: 217 - DNA, 501 bp, Glycine max
atgaagatcatccccggcagcaaggccgagccggagaaattctccggcacggtcacggaacacgaaaaccgcaaccgggagacggtaaaattggtgtacaaggcattattgcgtgatgccgacacggagaagcttgcgaaggtggtgagggcagagttggaatggtggtaccacgggcctcctcactgccagcacatgatgaaagtgttgaccggcgagtcaacgacggcgcaaaaggccttcaagtttaggcctcggaggatcagggccgtcggtgaccgcgtggtggttgaagggtgggagggggcgggggagtactgggtgcacgtgtggaggttcaagcacgggatcattactcagctgcgtgagtactttaacacgttgatcacggtggtgcatcgggtttcggaggacggcgatgaggctcgcttgtggcggagcaccaaccgagttcgggttcgggttcacgggtcgttgccggatcttgtgctttccatttga

SEQ ID NO: 218 - protein, 166 aa, Glycine max
MKIIPGSKAEPEKFSGTVTEHENRNRETVKLVYKALLRDADTEKLAKVVRAELEWWYHGPPHCQHMMKVLTGESTTAQKAFKFRPRRIRAVGDRVVVEGWEGAGEYWVHVWRFKHGIITQLREYFNTLITVVHRVSEDGDEARLWRSTNRVRVRVHGSLPDLVLSI

SEQ ID NO: 219 - DNA, 713 bp, Glycine max
acataagcccagaagcataaatttcacacaaaaaaattcacaacacggaggatcattaaaaggtggagatgcaaaacaaggcaacagttgaaatgctctacatggcactattagggcaagaaacaatggacaatgtggccaaactgctagcaagtgaccttgagtggtggttccatggccctcctcaatgccaccacatgatgaaggtgctcacaggggaaacagatcacaccaagggcttccggttcgagccgaagcaagtcaccgccattggagactgcgtgattgccgaggggtgggagggcaaggcctattgggtgcacgtttggaccctcaaaaatggcctcataactcagtttagagagtactttaacacgtggcttgtggtgagggatttgaggacaccaaggagggaagatagcaaagatagcatgacattgtgggaaagccagcctcgtgatctctatcaccggtcactgccaggacttgtgttaaccatttagccacaacaacacttgatggttgtggttaattggaacttgaattggaagctagttattagggacgtgatgtgtaatgtaccttatagtggcccctacggattaaacatgttgctctacaacattggaactattatactgttcgtacatatttggcttgtggacctggttgattgttcaataaaatggttttcatcattttgaatcaaaagg

SEQ ID NO: 220 - protein, 144 aa, Glycine max
MQNKATVEMLYMALLGQETMDNVAKLLASDLEWWFHGPPQCHHMMKVLTGETDHTKGFRFEPKQVTAIGDCVIAEGWEGKAYWVHVWTLKNGLITQFREYFNTWLVVRDLRTPRREDSKDSMTLWESQPRDLYHRSLPGLVLTI

SEQ ID NO: 221 - DNA, 726 bp, Helianthus annuus
catttgtggtaccgggaatcggccattcggccggggactcaatactattagttctcaccaaaaatgggagaaattaatgtaactgaacccaaaagccaaaaccaagcccttgtccatgctctttacaagacactagccagcggtgacactaaacatgtctctggaatattagccactgacctggagtggtggtttcatggccctctaaactgccacccacatgatgcgcatgctgaccggagaagccctaccaaacgagttcaagttcgaaccgcgaagtataacagccattggctacgagatagtgattgctgagggctacgaaggcgcacatgtgtattgggtacatgtgtggaccctgaaagatgggctgataactcgatttagggagtattttaacacgtggttgacggtgaaggagttgaagcccaagcccgttggacagtgggtgtcgaaggagaactgctccaccgtgtggcagagccagcctcgtgatcttttccggcggtcgttgcccgggctcatgcttgccatttgatgtcacaaatggtcaccattgttgtgtataagtaccatctacttcttgttcccttctaattgatgtgtcaagttcatgaagcaaacatgcaatttgcacacgttttttttttttgttaattgtgtgaaaagtttaaaaagtatttttaatgtgtacatttacccaagttatagtatggaagaatgacg

SEQ ID NO: 222 - protein, 105 aa, Helianthus annuus
MMRMLTGEALPNEFKFEPRSITAIGYEIVIAEGYEGAHVYWVHVWTLKDGLITRFREYFNTWLTVKELKPKPVGQWVSKENCSTVWQSQPRDLFRRSLPGLMLAI

SEQ ID NO: 223 - DNA, 725 bp, Helianthus exilis
ggagaaattaatgtaactgaacccaaaagccaaaaccaagccattgtccatgtctctttacaagacactagccagcggtgacactaaacatgtctctggaatattagccactgacctggagtggtggtttcatggccctctaaactgccaccacatgatgcgcatgctgaccggagaagccctaccaaacgagttcaagttcgaaccacgaagtataacaaccattggcgacgagatagtgattgctgagggctacgaaggcgcacatgtgtattgggtacatgtgtggaccctgaaagatgggctgataactcgatttagggagtattttaacacgtggttgacggtgaaggagttgaagcccaagcccattggacagtgggtgtcgaaggagaactgctccaccgtgtggcagagccagcctcgtgatcttttccggcggtcgttgcccgggctcatgcttgccatttgatgtcacaaatggtcaccattgttgtgtataagtaccatctacttcttgttcccttctaattgatgtgtaagttcatgaagcaaacatgcaatttgcacatgttttagtaaattatgtgcaaagtttaaaaagtattgttgatgtgtacattcacccacgttaaaagtattattaatgtgtacatttacccagcgactcatttccaacaaattggaattgtttagttgtgtattgttaatatgataaagatgtt

SEQ ID NO: 224 - protein, 140 aa, Helianthus exilis
MSLYKTLASGDTKHVSGILATDLEWWFHGPLNCHHMMRMLTGEALPNEFKFEPRSITTIGDEIVIAEGYEGAHVYWVHVWTLKDGLITRFREYFNTWLTVKELKPKPIGQWVSKENCSTVWQSQPRDLFRRSLPGLMLAI

SEQ ID NO: 225 - DNA, 940 bp, Hordeum vulgare
gcgagactcctgctcacctcacgagcaccaggtaagtagctgaggacctcagcctgaggtcgagccgccgtcgccatcgccgtcgtcgtcttcttcttcgtctccggcagggagcctcgggaggagctggctaacgagctggatcagctggagggcgggatcgcctcggcgccgcgcgggcacgagaccgaggagcagcgcaacaagttcctggtgctccgcctctacgaggcgctcaacgcccgcgaccacgccgccgtccactccctcctcgcccccgacctcgagtggtggttccatggcccgcccgcgcaccagcacatgatgcgcctcctcaccggcggcacatcaccgtcctccttccgcttccagccgcgctccgtcgacgccttcggctccaccgtcatcgccgagggcgtggacgacaaggccaccaaggcctactgggtgcacgcctggacggtgggcggcgatggggtgatcacccagctgcgcgagtacttcaacaccgacctcaccgtcacgcgcctcgccgccgccgccgcctccaagtgcgtctggcagagccgccgccccgaccgcgcccgcaactccctccccggcctcgtcctcgccctctagccacccaacccaagccaagccggacgacgacggccaccacttgggcgcacgcatgggctgacgctgctgtctttctttctttcttcatcaaccatcccctactctgctctccctggcctagttgtttcttgtttgcgtgtctggtgaacgtacgtagcatagctgaatagtcgccgaccaaccggccggtgatggcgacgcggcgccgtcatggcggctgcgtcttcactgctactgcttgtgtgtcttcgtcgttgctgtcatggtgtaatcatagtaatagtgataaaaggaagttggcttgtactggacgtaattt

SEQ ID NO: 226 - protein, 99 aa, Hordeum vulgare
MMRLLTGGTSPSSFRFQPRSVDAFGSTVIAEGVDDKATKAYWVHAWTVGGDGVITQLREYFNTDLTVTRLAAAAASKCVWQSRRPDRARNSLPGLVLAL

SEQ ID NO: 227 - DNA, 668 bp, Hordeum vulgare
tcccaccggccaccgtatctcgctgcctctcgccgagacgatcaccagcatcaggtagttgaggtccagccgccgtcgccgtcttcttcttcgtctccgacaggaggagctggctaacgagctggatcagctggagggcgggttcgcctcggcgccgcgcgggcacgagaccgaggagcagcgcaacaagttcctggtgctccgcctctacgaggcgctcaacgcccgcgaccacgccgccgtccactccctcctcgcccccgacctcgagtggtggttccatggcccgcccgcgcaccagcacatgatgcgcctcctcaccggcggcacatcaccggcctcctcctccttcatcttccagccacgctccgtcgacgccttcggctccaccgtcatcgccgagggcgtggacgacaaggccaaggcatactgggtgcacgcctggacggtgggcggcgatggggtgatcacccagctgcgcgagtacttcaacaccgacctcaccgtcacgcgcctcgccgccgccgccgcgtccaagtgcgtctggcagagccgccgccccgaccgcgcccgcaactccctccccggcctcgtcctcgccctctaactgcaatgtgatatgtacattcttttagtgtgtgggactacttaccacatttccacatgtc

SEQ ID NO: 228 - protein, 100 aa, Hordeum vulgare
MMRLLTGGTSPASSSFIFQPRSVDAFGSTVIAEGVDDKAKAYWVHAWTVGGDGVITQLREYFNTDLTVTRLAAAAASKCVWQSRRPDRARNSLPGLVLAL

SEQ ID NO: 229 - DNA, 660 bp, Malus x domestica
aattcggacgaggcaaattagagagcaaaagccaataatattctcagttaattccgctcccctcctatctcccctctctctctctctctctttctctctctctctctctctctctctctctctctaacaatctaccaaaaatgcagaacaaggcaattgttgaagctctctacaaggcattggcacagggcaaaacagacacagtgggaaagcttctagccagtgacctagaatggtggttccatggccccccaaagagccagcacatgatgcgcgtgctcacagggaagtccagccacactgacttcaggttcgagcccagaagcatcacagagattggagatggtgtgatcattgccgagggatgggaaggggccaaggcctactgggtccatgcgtggaccctcaaagatgggttgattacgcagttcagggagtattttaacacgtggctgactgtgagggatctgaagctggaggggtgggagagcttcactgtgtgggagagcatgccgaatgacctgttccaccgctccttgccagccctattgcttgctatttagaattttaattagaggacttgatgttgtgaattagcaagaaaaaaatatgggatatggagaaaaattaaataaagggtgcttgtggtttggcctcgtg

SEQ ID NO: 230 - protein, 140 aa, Malus x domestica
MQNKAIVEALYKALAQGKTDTVGKLLASDLEWWFHGPPKSQHMMRVLTGKSSHTDFRFEPRSITEIGDGVIIAEGWEGAKAYWVHAWTLKDGLITQFREYFNTWLTVRDLKLEGWESFTVWESMPNDLFHRSLPALLLAI

SEQ ID NO: 231 - DNA, 672 bp, Malus x domestica
ctcccctcctagctagcaccctcagttcatcctctctctctctcttacaatctaccaaaaatgcaaaacaaggcaactgttgaagctctctacaaggcgttggcacagagccaaacagacacagtgggaaagcttctagccagtgacctagaatggtggttccatggccccccaaagagccagcatatgatgcgcgtgctcacgggggattccagccacactgacttcaggttcgagcccagaagcatcacagagattggtggtggtgtgatcattgctgagggatgggaaggggcaaaggcctactgggtccacgtgtggaccctcaaagatgggttgatcactcagttcagggagtattttaacacgtggctgactgtaaaggatctgaagccggagggatgggagagcttcactgtgtggcagagcatgccgagggacctgttccaccgctccttgccaaccctattgcttgctatttagaattttaattacagtctttgatgttgtgaattagcaataaaaaatatgggttttgagaaaaataaagggtacttgtggtttgtagatttgagtttgaacaaggcatgatttggatgtgttgagaaaattgaagtgatgtagtaaaatggaactactaataaagatgtttccaaaacacaactttcgttc

SEQ ID NO: 232 - protein, 140 aa, Malus x domestica
MQNKATVEALYKALAQSQTDTVGKLLASDLEWWFHGPPKSQHMMRVLTGDSSHTDFRFEPRSITEIGGGVIIAEGWEGAKAYWVHVWTLKDGLITQFREYFNTWLTVKDLKPEGWESFTVWQSMPRDLFHRSLPTLLLAI

SEQ ID NO: 233 - DNA, 1631 bp, Marchantia polymorpha
cctgccttctcctctccctttctccccgagtcccttcgcgtctcgtcgctgcatctcgttcatctcgagcggcgtttcagttcgcgaaaaaaatctcctccaatcctcagacttctccttcagtcgttctccaaatcgagtcgtgagcccgacctcgacacgagcatcgctgtcgctgtgcttgcaaggcagaattgaagcagacgagtggaattctgtgattccgtggcagttggttgatcgtgattgtgtttgtgcgtgcgtgcgtgtgttggttgtgtttgcgtttgtagagtgcgcgtcctcgtaaggaagatagcggaaatttttgaagagctggcgaataccggaacactggcagacacaaactcagatgaagggatagttcgagcgctttaccgagcgttatcgcaaggagatgttcaccccgtgagcaagctcgtgacccctgacctcgagtggtggttccatggaccgccgagtcaggatcatatgatgcgattgctcaccggagccgcttcatgtgactccttcagctttgagcccgtgcggttcttctcccaaggtagcaaagtttttgtggagggcaagcactctactcgacataacgtgttctgggtccacatatggacggttaaagaagggcgcattactcaattgcgcgaatacttcaacactgcggtcctggtgaccgatctcaagccgaacaagccgtctgtagagatcgtctcaagctatccttgcactactatttggcagagtcagctctggaagagcaaggaagggaaatctcttccaggcttcattcttgcggtttgagaagattccgcgacttcgaagtcgcggtgttcaacgttctcattgcgggaaatgcagactcgtgaaataagtactatgatcacatcgtgagttggcacccaggaagctgaatttctcgagattgcagtaatgcactgcaagttttggcgaaaacatctagctagaaggtgttagcgaataatcgtgttatatcggcagaattttatgtcttctgtttttatgttttgtagtttggcctgtggagctgacggagatctgaaactttgttgttgagtgcgagtgctaggagagagagagagagatcgacgggtgattgacacgtcttagcaaacctgtcccacctcgtttgtttactcttatcggtcttatttgctgtcgatcatgtagagagacatagaggagatcatgcctaaacctctaggactgaaaactggaagcgcagaccaactgttagatgaaggtctccaccagattcctcaccatcatactaagacttacacatacgtatggttcacgcttcatcgttatttcgatgaaggacttgtccaacatacattttgccgaaaggatgatctttcattcattccttgtgggaagagtacactgttaaattttggagaatgggagatgtaaccaggctacatgcataatgatgtacgatctaaaactgagacatgcaaatgaataaggaagagtaactgtcgctctatatgcttggagataaaaacataaaaagtttatcaacagagataatatttccctgcaacttccgggcgaatgaatacatataaagtggggtaattcctcatttt

SEQ ID NO: 234 - protein, 108 aa, Marchantia polymorpha
MMRLLTGAASCDSFSFEPVRFFSQGSKVFVEGKHSTRHNVFWVHIWTVKEGRITQLREYFNTAVLVTDLKPNKPSVEIVSSYPCTTIWQSQLWKSKEGKSLPGFILAV

SEQ ID NO: 235 - DNA, 1538 bp, Nicotiana benthamiana
gtgtttccatagtttgtggatatctttcccctttcgaaaaatgactccttccatttccattgattccaatacaaacatgaattcagaaacagaaaacaagaacaaggccatagtgaaaactctgtacaaagcattagcttgtacatgtggtgacagtactaaaaacctactggggtctaatatttgctcatatattgccgatgatttagaatggtggtttcatggaccacagaattgtcattatatgatgaaaatgctcaccggagaattgtcaaatcagaattgtttcaagtttgagccaagaagtattgatgcaattgatgatgatcgtgtgattgttgaaggatgggaaggtgcaaaggcttattgggtacatgtttggacattgaaagatggtgttattactcagtttagggagtatttcaatacttggcttactgtgactgagttaaggcctatgggatgggtaagatcctctaccacgctgtggcagagccaccctcgagacctcgcgaaacggtcattaccagggcttatgctagccatttgacggtgaacaatggaacgacgaaaacttataatatgtggaatttacactggattgcatcatttaattatggttaagtgaaaaagaaatatatgtaattaaaaatgcattcaactgttgattaattgatggtaacactactaaatgtggtaataagttttttatacggtgaatgcatgttttatgtagtatagcccattaaggaaaaataagccaacgagtgtttcctattccccttacctaaaagtgaaaagtggataagtaagaagtttggttgtatatccaacggattatattaggaaatattgtacgcatgaattattggttaaacatgttatactgatcatagtttcatagtagcaaacacaataacaaatgaggttttccgtggagactctacgtggcaaccccttaattagtcgcctaaaaagtaagattcaacataaacaagtttccagaaaaaagtgatagtcttaattaaggctgtattgtgtggcggttctaggtttatttgtgcctggcgttccgggtctaacggtttcggttctggcggtttcgggtctggcggttctgccggttccgacggttccgggtctggcgattctcatggttggaaccggcccgtgacgggtctaagtaccatgcgattccggttctggcggttccgggtctggcgggtctgacgttttttttttaattcaatatcttgtatagtagtcattagtatagtgtagaatataatttatatggtgtactaagttattagtataatatatattgtgttgtagtaattagtatacattgtatataagtagtatatattgtatataagtagtatatattgtatatatgtagtgtatattgtgttgtagttagtaattagtataaattgtatataagtagtatatattgataaaagaatgttgtaattagtatattgtattgtatgttatatattgtatgttatataaatattcaaggattgatatcg

SEQ ID NO: 236 - protein, 169 aa, Nicotiana benthamiana
MTPSISIDSNTNMNSETENKNKAIVKTLYKALACTCGDSTKNLLGSNICSYIADDLEWWFHGPQNCHYMMKMLTGELSNQNCFKFEPRSIDAIDDDRVIVEGWEGAKAYWVHVWTLKDGVITQFREYFNTWLTVTELRPMGWVRSSTTLWQSHPRDLAKRSLPGLMLAI

SEQ ID NO: 237 - DNA, 852 bp, Nicotiana tabacum
tgagtttccaaagtttttggataacttttcccttcctttttcctttcaaaaaatggctccttccatttccattgattccaatacaaacatgaattcagaaacagaaaacaagaacaaggccatagtgaaaactctgtacaaggcattagcttgtacatgtggtgacagtcctaaaaacgtactggggcctaatatttgctcatatattgccgatgatttagaatggtggtttcatggaccacagaattgtcattatatgatgaaaatgctcactggagaattgtcaaatcagaattgtttcaagtttgagccaagaagtgttgatgcaattgatgatgatcgtgtgattgttgaaggatgggaaggtgcaaaggcttattgggtacatgtttggacattgaaagatggtgttattactcagtttagggagtatttcaatacttggcttactgtgactgagttgaggcctatgggatgggtaagatcctctaccacgttgtggcagagccaccctcgagacctcgcgaagaggtcattaccggggcttatgctagccatttgacggtggtgaatggaacgaggaaaacacttactcatatgcggaatttacacaggatcacatcatttaatcatggttaggtgataaagaaatatatgtaaaaagacgcattctactgtgattaattgatggcaacattaaatatggtaagtgttttatatggtgaatgcatgttttatgtagtatagcccattaggaaaaagaagccaacgactgattacctttttccctttcctaaatgtgaaaaatggaaatgtaagaagtttggttgtatatccaactgattatatatg

SEQ ID NO: 238 - protein, 169 aa, Nicotiana tabacum
MAPSISIDSNTNMNSETENKNKAIVKTLYKALACTCGDSPKNVLGPNICSYIADDLEWWFHGPQNCHYMMKMLTGELSNQNCFKFEPRSVDAIDDDRVIVEGWEGAKAYWVHVWTLKDGVITQFREYFNTWLTVTELRPMGWVRSSTTLWQSHPRDLAKRSLPGLMLAI

SEQ ID NO: 239 - DNA, 1254 bp, Oryza sativa
actccagccagcgagcgatccacctcgatctcttctcttcctctctctctctctctctctctctctctctctctctcctgagcgccaatcgatctcgtgatctagagctcgcttcctcgacttcgtgtcaaacaccgggaggagcggaggccgatcggagcctaagcggggctcgcgccaggagctggctaaccacaggcagggaacggcggcggcggcgcgcgaggcgtcggcgtcggtgtcggagctggcagagctggacggcgcaagggatcagccggaggagcaggacgccaagttcctggtgctgcggctgtacgaggcgctcaactccggggacgcgcgcagggcgcaggagctgctcgcgccggacctcgagtggtggttccatgggccgccggcgcaccagcacatgatgcgcctcctcaccggcgccgaccacggcgagtcaaggttcctcttctcccctcgctccgtcgacgccttcggctccaccgtcatcgccgagggcaccgacgacacccgccagctctactgggtgcacgcctggaccgtcggccccgatggggtaatcacccagctcagggagtacttcaacaccgacctcaccgtcacccgcctctccgcctccgccgccaagaccaccgccgccatttcttcctccaactccaaccacgcctcctcttcggcgccgccgccgccgccgtccaagcccaagtgcctgtggcagagccgccgcgccgaccgcgcgcacaagtcgctgccgggcctcgtcctcgccatctaagaacgaactcaaaagacatcaagaactcaaggcgcaaaaagcttccctaaattaatcacatataaaaaaaatcaagcgatacttatcaatagtgattagctaaataaataaaaacggaagcgcacgcactgagtgaagtcactagctatagtttattgcttatgggctaaagccgctcagctcaactgagctgcttcaggtttgcgtgattaatcccactaccactactgcaactagccagccagttaagtagtgttgcttttgcttgcttgtctgaaagctgaatcagcagtgtgaccagtagcatcagtagctttggtccaagtcattatggattatgtaagtgtgtactccttccacggtaaagctaaaccgtggctgaatatgaatgatggtctgttgttgttgcataaaagtactcgtagcttgttttgttggacacttaaaatcaacatatgtgatgtaca

SEQ ID NO: 240 - protein, 124 aa, Oryza sativa
MMRLLTGADHGESRFLFSPRSVDAFGSTVIAEGTDDTRQLYWVHAWTVGPDGVITQLREYFNTDLTVTRLSASAAKTTAAISSSNSNHASSSAPPPPPSKPKCLWQSRRADRAHKSLPGLVLAI

SEQ ID NO: 241 - DNA, 759 bp, Oryza sativa
atggtccactttaacatgtggcatggcatgatggtaaatggatttatggatatcagtaatctgtcggcaaagataatctgccaggggaagatgttgatctctgtcagcagaagtggtactggagacagattgagagattacaaattaatatatgcattagatgttggtaaaactttcggcgactacgacagcccagcagcagcagcagagctggctagcgacaaggtacacgcgaacggcgacgccgccgatgccggcggcggcggcgaggaggaggtggtggtgagcagcagcaaggcggtggtggaggagctgtaccgcgcgctggagcgcggcgacggggacgccgtgcggcggctgctgaacccggacgtggactggtggttccacgggccccgcgcgcaccagcatctggtgctcatgcgcctcctcaccggcggcggcggcggcgcggcggggctcccgttcaaggtccgcggcgtggacgccttcggggagacggtgctggcggaggggacggacgccacggggaagctgtactgggtgcacgcgtggacggtcggccccggcggccgcgtcaccggcgtccgcgagtactgcaacaccgcgctcgtcgtcaccaggctcggcggcggcggaggcggcaagggagccgaggcggcggcgccgtgctcgaggtcgcagtcggagcagttgtggcagagcaggctgcctgaccgggctcgcaagaacctccctgccctcgtcctcgccatctga

SEQ ID NO: 242 - protein, 252 aa, Oryza sativa
MVHFNMWHGMMVNGFMDISNLSAKIICQGKMLISVSRSGTGDRLRDYKLIYALDVGKTFGDYDSPAAAAELASDKVHANGDAADAGGGGEEEVVVSSSKAVVEELYRALERGDGDAVRRLLNPDVDWWFHGPRAHQHLVLMRLLTGGGGGAAGLPFKVRGVDAFGETVLAEGTDATGKLYWVHAWTVGPGGRVTGVREYCNTALVVTRLGGGGGGKGAEAAAPCSRSQSEQLWQSRLPDRARKNLPALVLAI

SEQ ID NO: 243 - DNA, 877 bp, Oryza sativa
cctcccaaccacaatctccctccttcacttggtttcttgttgtgcaactctcgtcgtctcgttcatccccgggctggcatcgcaggagctggcgtctcgacaggatcagcagccgcagcagctgctgctgcaccaacaacaacgacaagaagaagaagaagacttggagtcggagcagcagcggaaccagtggttggtgatccggctgtacgaggccatcaacgcccgagaccacaccgccgcgcacgccctcctcgccccggacctcgagtggtggtaccatggcccacccgccagccaccacatgatgcgcctcctcaccggctgcgcctcgccctcctcttcctccttccgcttccgcccgctctccgtccacgccctcccggcctccgacgtcgtcatcgccgagggcatcaccggccgctaccacgacagctactgggtgcacgcttggaccgtgggacccggccccaatggggatagggtcatcacccacctccgcgagtacctcaacaccgatctcaccgtcacccgcctcccgcccacccgctgcctctggcagagccgccgccccgacctcccggccctcctcctcgccctctaattcatcatcttattgtgattaccatcaatcagcttcaaccaatcccctccattctgctgttccaatacgtcgatcacacctagtacgcgtaattacagtattatttgcaattagtatataataagaaatgtggcctcctttacttcacttttactgcgtctgcgtcttcgtcagcggtgacgctctcgccgcttccgcagctactactgttcaaataatgtctcttgtatggttgaacaataataaagcagctttgcattctcatcttactgt

SEQ ID NO: 244 - protein, 99 aa, Oryza sativa
MMRLLTGCASPSSSSFRFRPLSVHALPASDVVIAEGITGRYHDSYWVHAWTVGPGPNGDRVITHLREYLNTDLTVTRLPPTRCLWQSRRPDLPALLLAL

SEQ ID NO: 245 - DNA, 594 bp, Phaseolus coccineus
gttccccaaaacagaggaagccagtttcccattaacccagaaatgaagcacatagcaagctccattgaaatttcaaagatggaagctgagaggaaccagaaggaggaaatgcagaatagggcaacagtggaaacactctacaaggccctgttgggtgaaggccaaatggacacagtggcaaacatgctagcaagtgaccttgagtggtggttccatggccccccacagtgccaacacatgatgagggtgctcactggggaaactgccctcaacaatggcttccggttcgagccaaggagcctcaccgccatcggcgactgcgtgatcgccgaagggtggaaaggaaaggcctactgggtgcacgtttggacagtcaagaatggcaccatcacacagttccaagagtacttcaacacatggctcgtggtcagagacttgaggtcacaaacatggaaaaaaaggcttgaaaacatgacattgtggcaaagccagccccgtgatctctatcgccgatccttgccgggacttgtcttacccatttagctataagggaaagaaatacatactcctgtagctctgaaaatttattgtatg

SEQ ID NO: 246 - protein, 166 aa, Phaseolus coccineus
MKHIASSIEISKMEAERNQKEEMQNRATVETLYKALLGEGQMDTVANMLASDLEWWFHGPPQCQHMMRVLTGETALNNGFRFEPRSLTAIGDCVIAEGWKGKAYWVHVWTVKNGTITQFQEYFNTWLVVRDLRSQTWKKRLENMTLWQSQPRDLYRRSLPGLVLPI

SEQ ID NO: 247 - DNA, 758 bp, Picea glauca
ggactattactacaacgagatatattgagataacttggggtataagaccagtctcacagttcaggcacatcagcgtcggccgtaccggcttcattcccattaacacaaacacatcgatacgaaatcaacaaaacccaagaaaactatgaaacctaaaaccaacatgcacctacacaactttctgtaaaacccaatctaatcaacaccatcggcatgaatatataattaaatggcaaggacgaggccgggcatggatttctccttagatttcacagcgctgctctcccacataggggaacacaactgtctctgccgaagaagtgaagggttgaagtccgttacagtgattgttgtgttgaaatactctcgaacttcagtgattatcccattttctagagtccagacgtgaacccagtattgggattcgtcctcgcgaccttcaacgaacaccttgttaccgacagcagtaacggactgaggtgtgaaggtgaaagagtgggaagagtagggttcacccgtgagcatacgcattaagtattgatagcaaggtggtccgtggaaccaccaatctaagtcgggggccaaaatcctctccacagtttcggcatctctcaaccccaacgcagcgtagagctcgcgaaccacctttatatattcttctccctccactgtgctctccgcatagtttggattagccagctctgaacaatgaaatcaaaaatatgagcgagacgatgaagatgatcaaagatagaagc

SEQ ID NO: 248 - protein, 101 aa, Picea glauca
MRMLTGEPYSSHSFTFTPQSVTAVGNKVFVEGREDESQYWVHVWTLENGIITEVREYFNTTITVTDFNPSLLRQRQLCSPMWESSAVKSKEKSMPGLVLAI

SEQ ID NO: 249 - DNA, 1067 bp, Picea glauca
atcataacaatccattgaaattaaatcaaaacgatccatgaacattaatattaaatcgaaacgacataacagacacataggtgtatacgactgatcggatgaaatccggggtaacagacacgtagatgtacgccactgatcggatgaaatccgagggaacagacacatagatgtatacgactgatcgaatgaaatccgagggatacaaatcataaggagatttgatctaaatctacatatatttcggacagatctggcagccataataccagtacaacacagaacagacagaaacccaaaaactataagcagactacatctctaccagacgcccagacccgcaaatagtctacatcccatccactggatctggcaatttattcagctatataagtttattcaacagatactgatttgcttatataatttagatcgccaggaggaggccgggcatggaattgtcgtcagagtgtccaagctcgctctgccagatgagagagcaacccagatgctttcgtcccaccgacgaagacgccgacgagggcttgaaatccgtcacgacaagagacgtgttaaaatactctcgaacttctgtaactatcccatcctcgtccacagtccagacgtgaatccagtaaacggattcgtcctcgtgaccttccacaaccaccttgttgccgagcgcggtgactgattggggggtaaacgaaaattgtttaatctgcgtagaaatgccagtgagaacagacatcaaacagtgccggtacgctggtgggccgtgaaaccaccactccaggtcgggggccaaaatcctctgcactgtctctgcatcgcctgtgtccagcgcctcgtagagccgccgcaccaccgcctgcggtgctgctgggatggggattgaactagccagctcttaacgaaacttgaggggaatcgaacccgagacgcggactgtaggagagattcgacccgctgattaaacgggatagaataggatttgagaaacgggaacaaagagaaagagaaatgaaacgaggcaaatcgaggaaatgaaataaaatagagcggag

SEQ ID NO: 250 - protein, 107 aa, Picea glauca
MSVLTGISTQIKQFSFTPQSVTALGNKVVVEGHEDESVYWIHVWTVDEDGIVTEVREYFNTSLVVTDFKPSSASSSVGRKHLGCSLIWQSELGHSDDNSMPGLLLAI

SEQ ID NO: 251 - DNA, 336 bp, Physcomitrella patens
atgagcaagctgctgacaggaatcatctcatttcgatctgttaccctgattccgtcgagcattcttgctactcacaatattgtgattgttgagggcgaaagtttttgccaagaggttgcgtgggtgcacatatggacagtcaaggaaggcaaactggttcagctccaggaatactggaacacagctgtctcaatcaactccagtgcttgcttaacttcggactcgtgttgttcgaagcggcaattaccattgcagtccacatctccaattatttggcagagcaaactctggcatgatgtgaataacaccaaacctggacttatcttgactatatga

SEQ ID NO: 252 - protein, 111 aa, Physcomitrella patens
MSKLLTGIISFRSVTLIPSSILATHNIVIVEGESFCQEVAWVHIWTVKEGKLVQLQEYWNTAVSINSSACLTSDSCCSKRQLPLQSTSPIIWQSKLWHDVNNTKPGLILTI

SEQ ID NO: 253 - DNA, 318 bp, Physcomitrella patens
atgaagcttttattaaccgggataacaacatgcaaaacattccatttcacgccaaatgaagtttttttatttggaaatagggtttttgtggaaggttttggaagaacaattaatacttcatgggttcatatatggactatacatcaaaacttatgtgtgatgttgagggagtattttaacaccgcaatcatggtcacaaatgtcacttcctctcaaaaagaacatgatgtgagttatatttggcaaagccatcttgcaaggatccgagacatcaatataccgggggttgttttggcttttgaaataaatacatcataa

SEQ ID NO: 254 - protein, 105 aa, Physcomitrella patens
MKLLLTGITTCKTFHFTPNEVFLFGNRVFVEGFGRTINTSWVHIWTIHQNLCVMLREYFNTAIMVTNVTSSQKEHDVSYIWQSHLARIRDINIPGVVLAFEINTS

SEQ ID NO: 255 - DNA, 348 bp, Physcomitrella patens
atgcgattgctcactggtgttacttcgtgtgacaccttcaccttcaagttgacgggcattcgcggaattggcaacagggttttcgtagaaggtgaagcaccatcagctcgtggaagtatatcaggcctgaagaagcctgtgtactgggtgcacatatggacgctgaaagacggtaaaatcacgcagctgcgagagtatttcaataccgcaatcctggtgacagacttgaaaccgacggcgccaactccacacgagattcagcaccacccatgcgcgtccctgtggcataaccgcctttggaagtccaaggaaggtcgggaactgcctggactgattttggctatctga

SEQ ID NO: 256 - protein, 115 aa, Physcomitrella patens
MRLLTGVTSCDTFTFKLTGIRGIGNRVFVEGEAPSARGSISGLKKPVYWVHIWTLKDGKITQLREYFNTAILVTDLKPTAPTPHEIQHHPCASLWHNRLWKSKEGRELPGLILAI

SEQ ID NO: 257 - DNA, 1092 bp, Pinus pinaster
aattcggcacgaggcctctttggttttttaaactctttttatttttctgtccctgttcccattgatcatcaaatccttttcagtttctttgatcagcggttcgagtctcacccccttccctgcgtttcgggttcgattcccctctagtttctttaagagctggctagttcaaatcccatcccagcagcacccgaggcggtggtgcgtcggctttacgaggcgctggagacaggcgatgcagagacggtgcagaggattttggctcccgacctggagtggtggtttcacggccctcccgctttccggcactgtttgatgtcttttctcactggcaattctacgcagattaagcaatttttgtttacccccgaatctgtgaccgcactgggcaacaaggtggttgttgaaggtcacgaggacgaatccgtttactggattcacgtctggactgttgatgagaatgggatagttacacaagttcgagagtattttaacacgtctcttgttgtgaccgatttcaagccggcctcggcgtctccgtctgtggggcgaaggcaggtggggtgctctctcatctggcagagcgaatttggacactctgacgacaaatccatgcccggcctcctcctggccatctaaatatatataagtaaatcagtatctgttgaataaacttatatgactgaataaattggcagattccagtggataggatgtagcctatctgtgtgggtctgggtgttagcaatgtagtctgcttagagtttttgggcctgtgtctgttttagttcatactgttagatctgtcccaaatatttgtagatcaagtcttgccatgatttgtgtatctgggatttcatctgatcagtggtatacggctatggcgtatacacttatgtgtctgttatgtcggatttcatccgatcaatcgtatacacctatgtatctgttatgtcggatttcatccgatcagtcgtatacacctatgtatctgttatgtcggatttcatccgatcagtcgtttacatgtatgtgtctgtcatatcgtctggctttaatattaatgttaatggatcgttttgttttaatctc

SEQ ID NO: 258 - protein, 107 aa, Pinus pinaster
MSFLTGNSTQIKQFLFTPESVTALGNKVVVEGHEDESVYWIHVWTVDENGIVTQVREYFNTSLVVTDFKPASASPSVGRRQVGCSLIWQSEFGHSDDKSMPGLLLAI

SEQ ID NO: 259 - DNA, 856 bp, Picea sitchensis
gattttctctttctctttgttcccgtttctcaaatcctattctatcccgtttaatcagcgggtcgaatctctcctacagtccgcgtctcgggttcgattcccctcaagtttcgttaagagctggctagttcaatccccatcccagcagcaccggaggcggtggtgcggcggctctacgaggcgctggacacaggcgatgcagagacagtgcagaggattttggcccccgacctggagtggtggtttcacggcccaccagcgtaccggcactgtttgatgtctgttctcactggcatttctacgcagattaaacaattttcgtttaccccccaatcagtcaccgcgctcggcaacaaggtggttgtggaaggtcacgaggacgaatccgtttactggattcacgtctggactgtggacgaggatgggatagttacagaagttcgagagtattttaacacgtctcttgtcgtgacggatttcaagccctcgtcggcgtcttcgtcggtgggacgaaagcatctgggttgctctctcatctggcagagcgagcttggacactctgacgacaattccatgcccggcctcctcctggcgatctaaattatataagcaaatcagtatctgttgaataaacttatatagctgaataaattgccagatccagtggatgggatgtagactatttgcgggtctgggcgtctggtagagatgtagtctgcttatagtttttggggtttctgtctgttctgtgttgtactggtattatggctgccagatctgtccgaaatatatgtagatttagatcaaatctccttatgatttgtatccctcggatttcattcgatcagtcgtatac

SEQ ID NO: 260 - protein, 107 aa, Picea sitchensis; identical to SEQ ID NO: 250

SEQ ID NO: 261 - DNA, 745 bp, Pinus taeda
tacattacactgtgcgtttgcgttttagatctggcgaagacgaatatatcgagggcgcctgaggaagagaacaagggggtcgtgtggcggctgtacgaggcgctgagcacaggagatgcagaaacggtgcagaggattttggccccgaacttggagtggtggttccacggccccccctcctgccagcacttgatgcgtctgctcaccggccgctccacgcgcactcgtttttccttcgtccccgattccatcaccgtgctcagtcacaacctggtggtggcggaaggtcgcgaggacgaatccgtgtactgggttcacgtctggagtctggacaatgcaggcttcacagtcactcacctcagagaatatttcaacacctctctcgttgtaacggagtttaacgcgccttcttcctcttcttcgtcaccgacgttggcggggcaagggcagaggcagcggtgttctgttcccctgtggcagagccagcttatcaaatccgacgctaattccatgcccggtctcgtccttgctgtctgatgataaatatatcacttggcaggcttccctgttccctaagggtgttatacttgcaatattgtgtgggtgttatacttgcaatattgtgtgtttgcaggtttgtctctatactaagagatgtgttttctatagattaacgaggggaacctcaagaccggaggaatatgtagagacatgttataacaaataaatgaggaatatgtagaga

SEQ ID NO: 262 - protein, 114 aa, Pinus taeda
MRLLTGRSTRTRFSFVPDSITVLSHNLVVAEGREDESVYWVHVWSLDNAGFTVTHLREYFNTSLVVTEFNAPSSSSSSPTLAGQGQRQRCSVPLWQSQLIKSDANSMPGLVLAV

SEQ ID NO: 263 - DNA, 834 bp, Pinus taeda
ccatcctaccagcaccggaggcggtagtgcggcggctttatgaggcgctgaagacgggcgatgcagagacggcgcagaggattttggctcccgacctggagtggtggtttcacggccctcccgcttaccgccactgtttgatgtcttttctcaccgccgattctccgcagactaagcaatttttgttttccccccaatccgtgaccgcgttgggcaacaaggtggttgttgaaggtcacgaggaagaatccatttattggattcacgtctggactgtggatgagaatgggatagttacgcaagttcgagagtattttaacacctctcttgttgtgacggatttcaagccgacctcggtgtcttcgtcggtggagcgaaggcaggtgggttgctctctcatctggcagagcgaatatggacactctgacgacaattccatgcccggcgtcttcctggccatctaaatatatatagctaaattagtatctgttgaataaacttatatcactgaataaattggcagattccagtggataggatgtagactatctgtgggtctgggggtggttagcaatgtagtctgcttagagtttttgggtgtgtgtctgtttttgttcgtagtggtagatctgtcccaaatatttgtacatcaagtcttgccatgatttgtatctctgggatttcatctgatggcgtatacacttatgtctgttaggtcggatttcatctgatcagtcgtatacacctatgtgtctgttgggtcggatttcatctgatctgtcgtctacatgcatgtgcctgtcatatcgtttgaatttgatattaatgcaaatg

SEQ ID NO: 264 - protein, 107 aa, Pinus taeda
MSFLTADSPQTKQFLFSPQSVTALGNKVVVEGHEEESIYWIHVWTVDENGIVTQVREYFNTSLVVTDFKPTSVSSSVERRQVGCSLIWQSEYGHSDDNSMPGVFLAI

SEQ ID NO: 265 - DNA, 800 bp, Pinus taeda
attggtttgttcattctccgaatctcccctgctctgctctttgtctttgtctttgtttctgtttcagtttttcgttcgcgttcagagctggcgaagacgaatatattgagggctgccgctgcagtggagaagaagaacaaaaaggtggtaaggcggctgtacgaggcgctggggtcgggcgatgcaaaaacggtgcagaggattttggcccctcacttggagtggtggttccatggccccccctcctgccagcacttgatgcggctgctcaccggccgctgcacgcacactcgtttttccttcgtccccgattccatcaccgcgctcagtcacaacctggtggtggtggaaggtcgcgaggacgaatccgtgtactgggttcacgtctggactctggacaatgcagattgcactgtcactgagctgagagagtacttcaacacctcccttgttgtaacggagttcaacccgccttcttcctcggcctccacgctggaagaaacagagcagattcagaggtgttcggtgcccctgtggcagagcgaactccttaaatccaacgctgattccatgcctggtctcgtcctccctctctgacatcatctatgtaacttttgcagccttccctgtacatctgtgtgttgtgttgtagtagccatgtagtctgtttgtttgcaggtttgtctctctggtcagacatatagtttgtaagaataagaatggtgggacgcctgacgttcacgtgggtacagtccacaaatacgccatgacgttttacaatatgataaatatagttatag

SEQ ID NO: 266 - protein, 112 aa, Pinus taeda
MRLLTGRCTHTRFSFVPDSITALSHNLVVVEGREDESVYWVHVWTLDNADCTVTELREYFNTSLVVTEFNPPSSSASTLEETEQIQRCSVPLWQSELLKSNADSMPGLVLPL

SEQ ID NO: 267 - DNA, 1063 bp, Pinus taeda
gcccattgcattggtcgtttcattgtcctcctaacagcaacaacaatctgccctgctgtttgtttttatttcggtgagaggattgttgattgtttttattccagtgaggggattgttgagaaattgggaacacagcgtactcattgtcaaggaagaaggttgaatgcagaaatcagataacaagaacgtctattctatagaccatctttaatctcatagacgtaaaaatcgcttttctttcaatcgacattacgttcattgtgcctctgttattttagagctggcgaacctaagggcgagagcggtggaggagaagaacaaacgagtggtaaggcggctgtacgaggcactaggaacgggagatgcagagactgtgcaggggattttggcccccgacttggactggcgattccacggcccaccctcttgccagtatttgatgcctctgctcactggcgtttccacgcacactgatttctccttctccccttactccattactgcgctcggccacaatctggtggtggccgaaggtcgcgaggacgaatccgtgtactgggttcacgtctggactctaccgaatgcaggctgcagagtcactgaactcagagaatacttcaacacctccgtcgtcgtaacggagttcaacccgccctcctcttcatcgtcaccttctacgttggcagggcaaacgcagaggcagcgttgttccgttcccctgtggcagagccacctcatcaaatccaactctaattccatgcctggcctcgtcctcgctgtctgatgataaatacatataacttggcagccttccctgttcatgtatgcgttgtagttgtgaagtgatcagtttatttgcatttgtgtgtgttgtaagagatgattttctataaaataacgataaccatgggaagcttggcgttcacgtgggcagagcccacaaatatggaggacgccttcctgctcgtgcttgacatatgtgaagactttttgtaacatataaatatagttataattataattatggtgtgatataaaagctttcacgctggctaatgttttc

SEQ ID NO: 268 - protein, 114 aa, Pinus taeda
MPLLTGVSTHTDFSFSPYSITALGHNLVVAEGREDESVYWVHVWTLPNAGCRVTELREYFNTSVVVTEFNPPSSSSSPSTLAGQTQRQRCSVPLWQSHLIKSNSNSMPGLVLAV

SEQ ID NO: 269 - DNA, 810 bp, Pinus taeda
tgccgaattcggcacgaggcctttcaccagttcttgttcacgatttctccgctcgttctgcttcttctctactgaatattgcaaagcataagctgcagccctggaggtggaagagcagaaaaggtcattggcggttgtgcgtcggctctacgctgcgctggcgtcgggagatgcacagacggtggaaaaaatcgtgacatccgacttggagtggcgattccacggccccccgtcctgtcaacatctcatgcgaattctcactggccaccatgagtcttcattcacctttgttccccactccatcactgcactcggctacaacatggtggtggcggaaggtcgcgaggacgaatccgtgtactgggttcatgtctggactctggacaatgcgggctgcacaatcactcagctcagagaatacttcaacacctctctcgttgtaacagagttcaaggcgccttcttcatcttctttgctttgtcagaaacaaccgtgcttgcagtcgcctctatggcagagcaagattgagaaatcgaagcagaagtgcatgccaggctttgtcctggcaatttgagttaaacttatttgatgtgtttttcgaggcttcgaatttcaaatttatctcgcttgtacaatggaaatgaagataatttcttttggaaatttgatgaagataatttgtttgggaactttcatatatccttttatagtttatatagattccaaggtaggcctgcaagaagtgatatttggaagaaaaatattctatgtacagtaactcattacttcagttttataatacccaaaatt

SEQ ID NO: 270 - protein, 108 aa, Pinus taeda
MRILTGHHESSFTFVPHSITALGYNMVVAEGREDESVYWVHVWTLDNAGCTITQLREYFNTSLVVTEFKAPSSSSLLCQKQPCLQSPLWQSKIEKSKQKCMPGFVLAI

SEQ ID NO: 271 - DNA, 1037 bp, Pinus taeda
gcctctttcgctcattcttttcttcgttttccctctttttatttgtctttgtccctgttcccattcatcaaatcctttcctatttctctgatcaacggttcgagtcttacccccttccctgcgtttcgggttcgattcccctctagtttctttaagatctggctagttcaaatcccatcctagcagcaccggaggcggtggtgcggcggctttacgaggcgctggagacgggcgatgcagagacggtgcagaggattttggctcccgacctggattggtggtttcacggccctcccgcttttcggcactgtttgatgtcatttttcaccggcaattttacgcagattaagcaattttcgttttccccccaatctgttaccacgctgggaaacaaggtggttgttgaaggccacgaggacgaatccgtttactggattcacgtctggactgtggatgagaatgggatagttacgcaagttcgagagtattttaacacctctcttgttgtgacggatttcaagccggcctcagcgtctctgtcggtggggcgaaggcaggtggggtgctctctcatctggcagagcgggtttagacactctgacgacaaatccatgcccggcctcctcctggctatctaaatatatataagtatagatctgttgaataaatttatatagcggaataaattggcagattccagtggataggatgtagcctatctgtgggtctgggtgtctttagcaatgaagtatgcttagagtttttgggtttgtgtctgttttagttcatactggtagatctgtcccaaatatttgtcgatcaaatcttgccatgatttgtatttctgggatttcatctgatcagtcgtatgcagctatggcgtatacacttatgtgtctgttatgttggatttcatccgatcagtcgtatacacctatgtgtctcttatgtcggatttcctccgatcagtcgtttacatgtatgtatctgtcgtatcgtttggctttaatattaatgttaatggatcgttttgtttt

SEQ ID NO: 272 - protein, 107 aa, Pinus taeda
MSFFTGNFTQIKQFSFSPQSVTTLGNKVVVEGHEDESVYWIHVWTVDENGIVTQVREYFNTSLVVTDFKPASASLSVGRRQVGCSLIWQSGFRHSDDKSMPGLLLAI

SEQ ID NO: 273 - DNA, 596 bp, Populus trichocarpa
ttactaaattcaaatccaggatacaacaccatgtctgccaatgccattgaatcccctatgccggaatcctttttgaaagtagaaatgcaaaacaagggcattgttgatgcactgtataagggattatcaaatggtcacacggggacagtggccaaactcatagcaagtgatctagaatggtggttccatggacctccacgatgccaacacatgatgagaatactcaccggggagtctagccacaccaagttcaagttcgagccaagaagcattgaggtcgtcggtgattgtgtgattgcggagggctgggaaggtgcacaagtttactgggtgcatgtatggaccttgaaagatggtgtgatcacacaatttagagagtacttcaatacatggctcaccgtgaaggatataagcccacatggttgggaaattaggcatgagaaccacaccttgtggcagagccacccaagagaccttttcagccgctcattgcctggccttattctcggtatttaggggctagtacttctgtaacaactgtgacattattgcacgaaagggaaatagacctacaagtaataatacaagaaaactga

SEQ ID NO: 274 - protein, 161 aa, Populus trichocarpa
MSANAIESPMPESFLKVEMQNKGIVDALYKGLSNGHTGTVAKLIASDLEWWFHGPPRCQHMMRILTGESSHTKFKFEPRSIEVVGDCVIAEGWEGAQVYWVHVWTLKDGVITQFREYFNTWLTVKDISPHGWEIRHENHTLWQSHPRDLFSRSLPGLILGI

SEQ ID NO: 275 - DNA, 740 bp, Populus trichocarpa
tttattttgactgatagtgacctgttcgttgcaacaaattgatgagcaatgcttttttataatgccaactttgtacaaaaaagcaggcttaaacaatgtctgccaatgacgccgtcgtattggccatgccggtatccgatttgaatgcagaaatgcagaacaaggctattgttgatgcactatacaagggattatcaaatggtgagatggagacggtggccagattcattgccagtgacctagaacggtggttccatggacctccaaaatgccaacacatgatgagaatgctcacaggggagtcgagccagaccaagttcaggttcgagccgagaaacatagaggccattggtgattgtgtgatcatagagggctgggagggtgcacaagtttactgggtccatgtatggaccttgaaagatggtgtgatcacacatttgagagagtacttcaatacatggctcacagtgacagatattagcccacatggttggaaaattaggcatgagaaccacaccttgtgggagagccaccctagagacctttttaaccgctcattgcctggccttgtcctgggcatttagggacccagctttcttgtacaaagttggcattataagaaagcattgcttatcaatttgttgcaacgaacaggtcactatcagtcaaaataaaatcattatttgccatccagctgatatcccctatagtgagtcgtattacatggtcatagctgtttc

SEQ ID NO: 276 - protein, 162 aa, Populus trichocarpa
MSANDAVVLAMPVSDLNAEMQNKAIVDALYKGLSNGEMETVARFIASDLERWFHGPPKCQHMMRMLTGESSQTKFRFEPRNIEAIGDCVIIEGWEGAQVYWVHVWTLKDGVITHLREYFNTWLTVTDISPHGWKIRHENHTLWESHPRDLFNRSLPGLVLGI

SEQ ID NO: 277 - DNA, 762 bp, Panicum virgatum
caagggaataataagctggaggagctggcggcgtctactaggagtaataagctggaggaggagcccctcggccgcctcggcgacgacccagcagctgccgagacagaggagcagcgcaacaagttcctggtgctccgcctgtacgaggcgctcaacggccgcgaccacgccgccgtgcaggccctcctcgcccccgacctcgagtggtggttccatggcccgcccaagcaccagcaccacatgatacgcgtgctcaccggcggatcatccaacaacaacaagaagcagaatagtaatttcagcttcgtgccgcgctccgtcgacgccttgggctgcagctcccccgtgatcgccgagggacagggacctgcaggtgtgtactgggtgcacgcctggaccgtgggcccggatgggctcatcacccagctgcgggagtacttcaacaccgacctcaccgtcacccgcctcgccgccgccaccaagtgcaagtgcgtctggcagagccgccgacccgacagggcaacaaactcgctgccaggcctcgtcctcgtcctcgccctctagtctttctttccttcttggcggcttggcccatccctcgtcttctagcgtttatttgttattacgcctgccatcatcacctagctagatccataaccatgaatgatgatgcggcatggtcatcgtcatcctctgtattactactactactacgcttcatcatcaccatcaccaataataaaaacaaaagtactattgtgc

SEQ ID NO: 278 - protein, 107 aa, Panicum virgatum
MIRVLTGGSSNNNKKQNSNFSFVPRSVDALGCSSPVIAEGQGPAGVYWVHAWTVGPDGLITQLREYFNTDLTVTRLAAATKCKCVWQSRRPDRATNSLPGLVLVLAL

SEQ ID NO: 279 - DNA, 1039 bp, Panicum virgatum
ccacgcgtccgtgggattggattggattggattacccaacaaacaagcaacaaggggttgcaaggcaacaaattaagagagatcacccagaccagaatcggaggagctggcggcgtctactaagctggaagaggaggatccggagccggtcggccgcctcggcgaagccccagcagcagcagcagcagcagagaccgagtccgaggagcagcgcaacaagttcctggtgctccgcctgtacgaggcgctccacggccgcgaccacgccgccgtgcaggccctcctcgcccccgacctcgagtggtggttccatggcccgcccaagcaccagcaccacatgatgcgcgtgctcaccggcgccggagccggatccaacaacaataatttcagctttgtgccgcgctccgtcgacgccttgggctccaccgtcatcgccgagggacctcccgccgaccagtgccacatcaggaatactaatgtgtactgggtccacgcctggaccgtgggcccggatggggtgatcacccagctgcgcgagtacttcaacaccgacctcaccgtcacccgcctcgccgccgccaccaagtgcaagtgcgtctggcagagccgccgccccgacagggcaacaaactcgctaccaggcctcgtcctcgccctctagccacctccatccatctagcttagctggagtaatttctttttcttaataaagacacgcaacgcatcatcagctagctagatccgatccatgaatgacgaaggtgcggcattgtcatcgtcatcctctgtatcactactatacatatcaccgtattatattcatatattgtgcttcatcatcacctgtaataaaaaacaaaagtgtatattgtgtttaattttattcagcggtatatatatggatcaattgcaaactctgatgcctgcatagcctgcttaattgccatgcggaaaagtcatctatcacaatgtaaagagaaaattttccatcggacgctctgtcgcaatattgagaattcaacaagataacattgattcc

SEQ ID NO: 280 - protein, 107 aa, Panicum virgatum
MMRVLTGAGAGSNNNNFSFVPRSVDALGSTVIAEGPPADQCHIRNTNVYWVHAWTVGPDGVITQLREYFNTDLTVTRLAAATKCKCVWQSRRPDRATNSLPGLVLAL

SEQ ID NO: 281 - DNA, 967 bp, Panicum virgatum
atcatacacacctcaccggcctgacaagagtcaagacaagccaagccccagcgagcaactacatacccccatggccaatggtcctctatataaggacctgccgacctctgctctagcacactccgttaccaagccttcttcttctcctccccggagccttctcctcactcctccgagctggctagcgacaagcgcgacgtcctcggcggcgatgccggcctgtgccttgataacggcgaggtggcggccgtgagcagcaagacggtagtggaggagctgtaccgtgccctggagcgcggcgacgtggacgccgtgccccggctgctgaacccggacgtggactggtggttccacggcccgcgggcgcaccagcacctggtgctcatgcgcctgctcaccggcggcggcggcggcctcccgttcacgatccggtcccttgacgcgttcggggcgaccgtgctggccgagggcaccgacgcgacgggggcgctgtactgggtgcacgcgtggaccgtggggccaggtggccgcgtcaccgaggtgcgcgagtactgcaacaccacgctcgtcgtgacgaggctcggcggcggcggcggtgccggtgccggtgccggggccgacgtcgccgctgctgcggcggagaaggcgaaggcgccgtgctcgcagtcgcagtcggagcaggtgtggcagagccggctgcccgaccaggctcgtcggaacctccctggcctcgtgcttgccatctgatctcatcagatgcgaatcatccatcgtgccttgtggccatcagctctgcatgtttccaatgtggttacagggacataaacgaatcaaatgcctataaaaaagcaaaagaaatcatgtgatatttgtgtgatgcgattcctgctggtgattggtgaacataatttagcagcatgttgattgggctacacatatgaaattagaaatggttttatttaaattt

SEQ ID NO: 282 - protein, 120 aa, Panicum virgatum
MRLLTGGGGGLPFTIRSLDAFGATVLAEGTDATGALYWVHAWTVGPGGRVTEVREYCNTTLVVTRLGGGGGAGAGAGADVAAAAAEKAKAPCSQSQSEQVWQSRLPDQARRNLPGLVLAI

SEQ ID NO: 283 - DNA, 1092 bp, Panicum virgatum
ctgcttgctctccccccgccgagcagcgcttcccgttgcagggtagcctccgcgtttcccgagagaagaggtcgagggagcctgcgcgggggactcgcgtctggagctggctacccaccaccagggtcagggagcggcctcgccgcgcccgcacgaggcggcggagctggccgccctcgtggggacggaggagtcggaggagtcggaggagcagcgcaaccgcttcctggcgctgcgcctctacgaggcgctcaacgcccgcgacgcgcgccgggcgcaggagctgctcgcgcccgacctcgagtggtggttccatggcccccccgcgcgccagcacatgatgcgcctcctcaccggcgccgagaaaggcagcggcggcttcgtcttctccccgcgctccgtcgacgccttcgggtccaccgtcatcgccgagggcgccgacgacgcgcggcagctctactgggtgcacgcctggaccgtgggacccgatggggtgatcacccagctcagggagtacttcaacaccgacctcaccgtcaccctcctctccggcgccgcctccgccaagaacgccgcgattgcagccgctcctccgaagcaggacgccgcgtcttcctcctcctcctcctcttcctccttcgcgccctccgcgggcgcctcctcctccacaggccccaagtgcctgtggcagagccgccgcgccgaccgcgcgcacaagtcgctgccgggcctcgtcctcgccatctgatccgcatcagagacggcaagagcgacctgatcccctccataactaatccaataaaccacccgaaattacatagtattagcgcataaataatctgcaactggtctagccttttatcaggtaatgatcaaagccaatcagtcgttgaaggcgtatgcgtatcagcgtatggtctgaactgaaactgctccgagttgtggggtccgctaccagttgcgttgcttagcgtgtgtgttggattagtagtgtgataagtccaagtcatggactatggtgtgtactgctgccattactactactgtgatggtctattatggtctgatgaaagtgatggtatgttgggcttc

SEQ ID NO: 284 - protein, 136 aa, Panicum virgatum
MMRLLTGAEKGSGGFVFSPRSVDAFGSTVIAEGADDARQLYWVHAWTVGPDGVITQLREYFNTDLTVTLLSGAASAKNAAIAAAPPKQDAASSSSSSSSSFAPSAGASSSTGPKCLWQSRRADRAHKSLPGLVLAI

SEQ ID NO: 285 - DNA, 950 bp, Phaseolus vulgaris
gtttccaattaacccagaaatgaagcacatagcaagctccattgaaatttcagagatggaagctgagaggaaccagaaggaggaaatgcagaacagggaaacagtggaaacactctacaaggccctgttgggtgaaggccaaatggacacagtggcaaacatgctagcaagtgaccttgagtggtggttccatggccccccacagtgccaacacatgatgagggtgctcactggggaaactgccctcaacaatggcttccggttcgagccaaggagcctcaccgccatcggcgactgcgtgatcgccgaagggtgggaaggaaaggcctactgggtccacgtttggacagtcaagaatggcaccatcacacagttccgagagtacttcaacacatggctcgtggtcagagacttgaggtcacaaacatgggaaaaaaggcttgaaaacatgacattgtggcaaagccagccccgtgatctctatcgccgatccttgccgggacttgtcttagccatttagctataagagaaagaaatacatattcctgtagctcggaaaatttattgtatgagcttagatcttcacgtgtgcataattcagatcaatctctactacgtgactcatgttgatattgatcagagctatggagatgtgatagtggcggactatacaataaattttccgtaaggtgaaatttatgtgaggtttgttacttttgtttaattagttgagtgaaaccttcatgaatttgatcaataacagaaagagtcttgaaaagagtattttgctggtatagctctaggtcttggttgaagttcaagaatgtgaagttgtgagatagttggggtataatctttgtagggttgtgaaagttgtggaccacattgagttttcgtacatatttggactgattaattgttcaataaaatgacagtgaagtaaaaactgt

SEQ ID NO: 286 - protein, 166 aa, Phaseolus vulgaris
MKHIASSIEISEMEAERNQKEEMQNRETVETLYKALLGEGQMDTVANMLASDLEWWFHGPPQCQHMMRVLTGETALNNGFRFEPRSLTAIGDCVIAEGWEGKAYWVHVWTVKNGTITQFREYFNTWLVVRDLRSQTWEKRLENMTLWQSQPRDLYRRSLPGLVLAI

SEQ ID NO: 287 - DNA, 420 bp, Sorghum bicolor
atgatgcgcctcctcaccggcgcggaccagcgcgacaaacagaaccgcggcggcggcggcgggttcgtcttctccccgcgctccgtcgacgccttcgggtccaccgtcatcgccgagggcgccgacgacgcgcgccagctctactgggtgcacgcctggaccgtggggcccgacggcgtgatcacccagctcagggagtacttcaacaccgacctcaccgtcaccctcctctccggctccggcgccgtctcctccaccaagaaagctgacattgcaggcgctctgcctaagctacaggacgctgcgtcttcttcttcttcctcctccccctcggcagctgcagggcccaagtgcctgtggcagagccgccgcgccgacagcgcacacaagtcgctgccgggcctcgtcctcgccatctga

SEQ ID NO: 288 - protein, 139 aa, Sorghum bicolor
MMRLLTGADQRDKQNRGGGGGFVFSPRSVDAFGSTVIAEGADDARQLYWVHAWTVGPDGVITQLREYFNTDLTVTLLSGSGAVSSTKKADIAGALPKLQDAASSSSSSSPSAAAGPKCLWQSRRADSAHKSLPGLVLAI

SEQ ID NO: 289 - DNA, 324 bp, Sorghum bicolor
atgatgcgcctcctcaccggcggcggcggcagctctggaggcttccgcttcgtcccgcgctccgtcgacgcgctcgtcgcccccacccccaccacctccaccaccgtcatcgccgagggccacgaggggcggtgctactgggtgcacgcctggaccgtgggcgccgatggggtgatcacccagctccgcgagtacttcaacaccgacctcaccgtcacacgcctcgccgccgtcgccgtcgccgcctccgccaagtgcgtgtggcagagccgccgccccgacagcgccaccaactcgctgccgggcctcctcctcgccctctga

SEQ ID NO: 290 - protein, 107 aa, Sorghum bicolor
MMRLLTGGGGSSGGFRFVPRSVDALVAPTPTTSTTVIAEGHEGRCYWVHAWTVGADGVITQLREYFNTDLTVTRLAAVAVAASAKCVWQSRRPDSATNSLPGLLLAL

SEQ ID NO: 291 - DNA, 744 bp, Sorghum bicolor
atgcttttggaatctactcacatcccaccaattgttcctctatataaggaccaaccgacctctactctagcgcacactccaccagagcaggctacactacttctctcctccctctatcccggagccgttaattcactcacgtcgccgatcgagctggctagcgacaagcgcgacgtcgtcgccgtcggcggcgatgccggcttctgcgctgatgacggcgagccgtcgccggcagtgagcagcaaggcggtggtggaggagctgtaccgcgcgctggagcgcggcgacgtggacgccgtgcgccgcctgctgaacccggacgtggactggtggttccacggcccgcgcgcgcaccagcacctggtgctcatgcgcctgctcaccggcgctggcgccggcgccggcctcccgttcaagatccggtccctggacgccttcgggccgaccgtgctggccgagggcaccgacgtgacgggcgcgctctactgggtgcacgcctggaccgtgggaccccgcggccgcgtaaccgaggtgcgcgagtactgcaacaccgcgctcgtcgtgacgaggctcggcggcggcggcggtggcggtggcggtggcgccgacgccgacgccgcggcggcggcggcggaggaggccaaggcgacgttatcgcggtccccgtcaaagcaggtgtggcagagccggctgctacccgaccgggctcgcaggaacctccctggcctcgtgcttgccatctga

SEQ ID NO: 292 - protein, 247 aa, Sorghum bicolor
MLLESTHIPPIVPLYKDQPTSTLAHTPPEQATLLLSSLYPGAVNSLTSPIELASDKRDVVAVGGDAGFCADDGEPSPAVSSKAVVEELYRALERGDVDAVRRLLNPDVDWWFHGPRAHQHLVLMRLLTGAGAGAGLPFKIRSLDAFGPTVLAEGTDVTGALYWVHAWTVGPRGRVTEVREYCNTALVVTRLGGGGGGGGGGADADAAAAAAEEAKATLSRSPSKQVWQSRLLPDRARRNLPGLVLAI

SEQ ID NO: 293 - DNA, 625 bp, Selaginella lepidophylla
gcttgatcgaatccgctgccgattggactcctcagtttcaagccattcgtcttcgatcgagcgatcatttgatcgagtttcatctctagaatttgcctagggttcttcccgctcccaaaccctagctctcccttctgtgcatgtctcaagtcaaggttctcaaggcgctctacaaggcaattgcgtctggtgatgtaggcggcgtgcagggccttgtcgccccagacatcgagtggtggtttcacggcccagcatcggagcagcatctcatgcgcatgctcacgggagtcgatcctctcggctcgctcgccttcaagccaacgcgtgtctcctgggtccaaccgggagccaagatcatcgccgaaggtctcatcctcccaccccgatcctccaccgtcgtctcctgggttcacgtcttcaccatcgagcgcggcaaaattgtcgagctccgcgagtacttcaacgcctccgttaccgtcacgtccagcagccccgcaacgctgtggcaaagccaggtgactggaacctacatgccgggactcatcgttgcggtgtgagacaacttccgcagcttccaggaatgtagatagatgcgtgtgtgcgtgtttgtttgactagatcgtca

SEQ ID NO: 294 - protein, 138 aa, Selaginella lepidophylla
MSQVKVLKALYKAIASGDVGGVQGLVAPDIEWWFHGPASEQHLMRMLTGVDPLGSLAFKPTRVSWVQPGAKIIAEGLILPPRSSTVVSWVHVFTIERGKIVELREYFNASVTVTSSSPATLWQSQVTGTYMPGLIVAV

SEQ ID NO: 295 - DNA, 471 bp, Selaginella moellendorffii
atgtctcagagcagcgcctctccgattgagagaaatttggggaaagatctggctagcgagcaggagggctacgcggtgctgcgaaatctctaccgggcggtgtcgcagggtgatgtagagatcgtcaaggccctggtggccgcggacatcgagtggtggttccacgggccaagggcggagcagcatctcatgcgcatgctcactggcgcggatcggctgggatcgatcgcgtttagccccagcagggtttgcctcgtccaggacaagttcttggccgagggattcttggacgcctccaagtcgtgctgggttcacgtcttcaccatcaagtcgggcaaggtcgtggagctgcgcgagtacttcaacacctcggtcacggtcacgggcgccggattcttcaccagggatgacccgctgtgggaaagcgagctcacgttgacatccatgcccggattgatcgtcgcggtgtga

SEQ ID NO: 296 - protein, 156 aa, Selaginella moellendorffii
MSQSSASPIERNLGKDLASEQEGYAVLRNLYRAVSQGDVEIVKALVAADIEWWFHGPRAEQHLMRMLTGADRLGSIAFSPSRVCLVQDKFLAEGFLDASKSCWVHVFTIKSGKVVELREYFNTSVTVTGAGFFTRDDPLWESELTLTSMPGLIVAV

SEQ ID NO: 297 - DNA, 888 bp, Saccharum officinarum
  misc_feature (570)..(570): n is a, c, g, or t
  misc_feature (668)..(668): n is a, c, g, or t
ctccgatcgatctgccatctttatctatccaaccccaacccaacccaacaatcaagggagctggcggcgtcttctgcttctaagctggagagagctggagctggaccagtgcgcggcgccaccgccggagagggcgacgacataggcatcgacccgctgccggacgcctcctccgagactccggagcagcgcaacaagttcctggtcctccgcctgtacgaggcgctcaacgcccgggaccacgccgccgtgcagtcgctgctcgcgcccgacctcgagtggtggttccatggcccgcccaagcaccagcacatgatgcgcctcctcaccggcggcagcggcagcggcagcggcttccgcttcgtcccgcgctccgtcgacgcgctcggcgcccccaccagcaccgtcatcgccgaggggcaggagagagggtgctactgggtgcacgcctggaccgtgggcgccgatggggtgatcacccagctccgcgagtacttcaacaccgacctcaccgtcacccgcctcgccgccgtcgccgcctccgccaagtgcgtgtggcagagccgccgncccgacagcgccaccaactccctgccgggaattctcctcgccctctgaacactctgatcaccgtcatcgatccattccccttccctgggaattggatngggattggaattaatcagaaccagatcagatcagattcattcctccacccaagtcgtcgtggtatattggatttttgcttgccccttttctttcacaatcgtcgtcgtggtcgtcttgaattctaccctagtcgggtgtttatccgtacgttcccgatcccctcccacttttgatgtcctgggccacggtgggccccccttttttcacacaaatatcttt

SEQ ID NO: 298 - protein, 101 aa, Saccharum officinarum
MMRLLTGGSGSGSGFRFVPRSVDALGAPTSTVIAEGQERGCYWVHAWTVGADGVITQLREYFNTDLTVTRLAAVAASAKCVWQSRRPDSATNSLPGILLAL

SEQ ID NO: 299 - DNA, 611 bp, Saccharum officinarum
agcgcggcgacgtggacgccgtgcgccgcctgctgaacccggacgtggactggtggttccacggcccgcgcgcgcatcagcacctggtgctcatgcgcctgctcaccggcgccggcggcggcctcccgttcaagatccggtccctggacgccttcgggccgaccgtgctggccgagggcaccgacgcgacgggtgcgctctactgggtgcacgcgtggaccgtgggccccggtggccgcgtcaccgaggtgcgcgagtactgcaataccgcgctcgtcgtgacgaggcttggcggcggtggtggcgccgacgccgctgcggcggcggcggaggaggaggccaaggcgacgttctcgcggtccccgtcaaaacaggtgtggcagagccggctgctccccgaccgggctcgcaggaacctccctggcctcgtgcttgccatctgatcggatcagatgcgaatcatgccatatatgcttctaaactggcgtgtggcttattatgctttctagagactagagatgggctatgcatgtcttcaaaatgtggttacaattggacgtgaatgaatcaaatgcgtcacattaaaaaattgaaattagtcgaagcaaatc

SEQ ID NO: 300 - protein, 116 aa, Saccharum officinarum
MRLLTGAGGGLPFKIRSLDAFGPTVLAEGTDATGALYWVHAWTVGPGGRVTEVREYCNTALVVTRLGGGGGADAAAAAAEEEAKATFSRSPSKQVWQSRLLPDRARRNLPGLVLAI

SEQ ID NO: 301 - DNA, 710 bp, Triticum aestivum
  misc_feature (710)..(710): n is a, c, g, or t
ccacgcgtccgcccaccgtatctcgttgcctctcgccgagacgatcgtcgcgagcagcaagtagttgagatcaagccgccgccgccgccgcagtcttcttcttcgtctccgacaggaggagcggccggagctggctaacctggatcagctggagggcgggttcgcctccgcgcgcgggcacgagaccgaggagcagcgcaacaagttcctcgtgctccgcctctacgaggcgctcaacggccgcgaccacgccgccgtgcactccctcctcgcccccgacctcgagtggtggttccatggcccgcccgcacaccagcacatgatgcgcctcctcaccggctccagctccccgtcctcctcctcctccttccgcttcgagccgcgctccgtggacgccttcggctccaccgtcatcgccgagggcgtctcggccgccggcgaggacaccaaggcggcgtactgggtgcacgcgtggaccgtgggctccgatggggtgatcacccagctccgcgagtacttcaacaccgacctcaccgtcacccgcctcgccgccgccgccgcgtccaagtgcgtctggcagagccgccgccccgaccgcgcccgcaactccctccccggcctcgtcctcgccctctagccgcccaagcccagcccaagccagctggacgacgcccaccacttgggcttgggcgtacgcatgggctgacgtn

SEQ ID NO: 302 - protein, 105 aa, Triticum aestivum
MMRLLTGSSSPSSSSSFRFEPRSVDAFGSTVIAEGVSAAGEDTKAAYWVHAWTVGSDGVITQLREYFNTDLTVTRLAAAAASKCVWQSRRPDRARNSLPGLVLAL

SEQ ID NO: 303 - DNA, 584 bp, Thlaspi caerulescens
  misc_feature (490)..(490): n is a, c, g, or t
  misc_feature (555)..(555): n is a, c, g, or t
aaatgagaaacaaggggaccatagagtcacctgtacagagcgttgcagaaaggcgaggcatcgacggtggcgaaactggtggcgagtgacgtggaatggtggttccatggaccgcaccagtgccagcacatgatgaggctgctaacaggggaagcaccgagcgaggtgtcgttcaggtttgagccaagcagcgtgcaagcggtggtggctggtcatgggtgcgtgatcgcagaaggatgggagggttcgcacgtgtattgggttcacgtgtggaagttgaaagagggagtggtgacagagctaagggagtatttcaacacgtggctcactgtcacggattacagtctcgggccaataggatgggacatgggccgttgtacggtttgggagagcgtacagagggacctggctcgtggttcgttgcccagcttgcttttaactatttaactagtactcctatataagagtatagacagttgttgggtctggnggtttctttactttttatgttataaaagttgcctactcatcactcttgatgcctaagcaactgtnattcaaggataaaaataacttgttcccat

SEQ ID NO: 304 - protein, 105 aa, Thlaspi caerulescens
MMRLLTGEAPSEVSFRFEPSSVQAVVAGHGCVIAEGWEGSHVYWVHVWKLKEGVVTELREYFNTWLTVTDYSLGPIGWDMGRCTVWESVQRDLARGSLPSLLLTI

SEQ ID NO: 305 - DNA, 779 bp, Tortula ruralis
  misc_feature (558)..(558): n is a, c, g, or t
ccgctttcagcaaacacatacatttccacatcgcttgtggaggatacgtttcaccatcttccaccgccgtcctcaaccctggcagaagcaatcgcgccttcctcctcctcgtcgtcgtctgcgctggagcatgccaacgcgaggctggtgcggtcgctgtacgaggcgctagcggcgagcgatgcggggcgcgtaagggagctagtgcacgcggatctggagtggtggttctacgggccgcggcgcgagcagcacatgatgcgcctgctcacgggcgccaccaccagcgacaccttcgcgttccgcctcaccagcgtgcgcgccatcggcagccgcgtgttcgtggagggcgaggccggcaagggcaagtgctgggtgcacatatggacgctcaaggataagcgcgtcacgcagctgcgcgagtacttcaacaccgccatcctcgtgacggacctgcgccaggccgcgcccacgccgcacgaggtccagcaccacccctgcgtcccgctctggcagaaccacctctggaagtccctggagggccgcgaactgcccggnctcatcctcgccatctaaactcgacatgtagctccatccatggcggatccgggttagccagctccgtatacataatcacggcgtcaatttctttctattacatcgttagttctgcggcttggttgcgtgtctcagaaactaaggtttcgttaatactgatgcgactcctggatctactggcttgcaagaacctatatcgcaacattgatggccgggcggga

SEQ ID NO: 306 - protein, 106 aa, Tortula ruralis
MMRLLTGATTSDTFAFRLTSVRAIGSRVFVEGEAGKGKCWVHIWTLKDKRVTQLREYFNTAILVTDLRQAAPTPHEVQHHPCVPLWQNHLWKSLEGRELPGLILAI

SEQ ID NO: 307 - DNA, 636 bp, Triticum turgidum
  misc_feature (582)..(582): n is a, c, g, or t
  misc_feature (621)..(621): n is a, c, g, or t
gaattcggcacgaggatctcgttgcctctcgccgagacgatcgtcgcgagcagcaagtagttgagatcaagccgccgccgccgccgcagtcttcttcttcgtctccgacaggaggagcggccggagctggctaacctggatcagctggagggcgggttcgcctccgcgcgcgggcacgagaccgaggagcagcgcaacaagttcctcgtgctccgcctctacgaggcgctcaacggccgcgaccacgccgccgtccactccctcctcgcccccgacctcgagtggtggttccatggcccgcccgcgcaccagcacatgatgcgcctcctcaccggctccagctccccgtcctcctcctcctccttccgcttcgagccgcgctccgtggacgccttcggctccaccgtcatcgccgagggcgtctcggccgccggcgaggacaccaaggcggcgtactgggtgcacgcgtggaccgtgggctccgatggggtgatcacccagctccgcgagtacttcaacaccgacctcaccgtcacccgcctcgccgccgccgccgcgtccaagtgcgtctggcagagccgncgccccgaccgcgcccgcaacttcctccccggcctcgtnctcgccctctagccg

SEQ ID NO: 308 - protein, 105 aa, Triticum turgidum
MMRLLTGSSSPSSSSSFRFEPRSVDAFGSTVIAEGVSAAGEDTKAAYWVHAWTVGSDGVITQLREYFNTDLTVTRLAAAAASKCVWQSRRPDRARNFLPGLVLAL

SEQ ID NO: 309 - DNA, 1037 bp, Vitis vinifera
atggcaggcaatgatattgagtattcttccatgtctatggaggtagaaagccaagacaaggccaatgtcattgaactctacaatgcattggccaatggcgacactcaaattgtggccgggcttctagccagtgaccttgaatggtggttccatggccctccactatgccaacacatgatgcgggtgctcactggggagtcggtccacacggagttcaagttcgagcctcggagcatcactgccattgacggctgtgtgattgctgaaggctgggaaggagcacaagcatactgggttcatgtgtggactctaaaaaatggcctgattacccagtttcgggagtatttcaacacatggctcactgtgagggatctgagacctgcggagtgggagagccccacgctgtggcagagccagcctcgggaccttgccaaacgctcgctgccaggccttctgcttgccatctagattgatggaacattacatgaaatagacctgcatgcgaaagttgaggaagctgaaactatgatccatcaatcaaaatgtaaaatattcattgtattttgttgcacgtgggctatcaaaatttgaaataaaaaaaaattagaaaggggttgttttataatgatttctttgaaatggcctaccggagatatggctgtttctgagatcacaccaaacactctggtccatattacacacaaagcttgtgtccttttccatccagctgctctacgcgtgcacacgtctctggctctacctgcttacactggcagtgagggccatgtacctgcagagactctagcaagtagagaaagcaatggcatcttggataatgcaggcatggaataaccaatggaagggaaaggttcaaagttctacctgatgtcattaatgggtgctggtgagaatcctaagttcctaacccctgtcagcctaaaaggaagaattagcaaggaaatagagttgtcccataaaacaaaatcttaacaatggatcagggtatcacttccctataaactaatttgttattagca

SEQ ID NO: 310 - protein, 155 aa, Vitis vinifera
MAGNDIEYSSMSMEVESQDKANVIELYNALANGDTQIVAGLLASDLEWWFHGPPLCQHMMRVLTGESVHTEFKFEPRSITAIDGCVIAEGWEGAQAYWVHVWTLKNGLITQFREYFNTWLTVRDLRPAEWESPTLWQSQPRDLAKRSLPGLLLAI

SEQ ID NO: 311 - DNA, 704 bp, Zea mays
atggaccctgcagtccggtccggaattctgcaaaagagcgcgcgtccgggcgccactgccgagggcgacgagataggcatcgacccagcggcggagactccggagcagcgcttcaagctcctggtcctccgcctgtacgaggcgctcaacgcccgggaccacgccgccgtgcagtcgctgctggcgccggacctggagtggtggttccatggcccgcccaagcaccagcagcacatgatgcgcctcctgacaaccaccaccaccaccaccaccggcagcttccgcttcgtgccccgctccgtggacgccctcgccgcctcgtccggcaccgtgatcgccgagggccacgagaggggttgctactgggtgcacgcctggaccgtgggacccgatggggtgatcacccagctccgtgagtacttcaacaccgacctcaccgtcacccgcctcgccgccgccgtcgccgccaagtgcgtctggcagagccgccgccccgacagcgccaccaactccctgccgggactcctgctcgccctctgactctgagggataaataccatctctatctatatacgtatcatccttgtcgtcgtcgtcgtcagtcagtgcaaaccggcgtgtgtatgtatgtatctacctacgtattgtatttgatcccatccatgggcgtatgtcactattatatatatacagtatatctcatc

SEQ ID NO: 312 - protein, 179 aa, Zea mays
MDPAVRSGILQKSARPGATAEGDEIGIDPAAETPEQRFKLLVLRLYEALNARDHAAVQSLLAPDLEWWFHGPPKHQQHMMRLLTTTTTTTTGSFRFVPRSVDALAASSGTVIAEGHERGCYWVHAWTVGPDGVITQLREYFNTDLTVTRLAAAVAAKCVWQSRRPDSATNSLPGLLLAL

SEQ ID NO: 313 - DNA, 1163 bp, Zea mays
gtctgaaccaaaatctcatgatatcttagccccggtctgcgatgcgacggccgacggccatggatggcaatatctctaaatcgcgaggacctatacgctaatctaacgctcagccgcggcgctcttgcgcgctcctacataaacaaccccggcccgcctcgacacacagacacagcagccgtttccactgacagtttctcagaaccacagcctcgatccatcgggggagaggatgggagagcctacgcggcaggagctggcggaggcggcgctcgccggggagtcggcggagcagcgcaaccgcttcctggtgctgcggctgtacgaggcgctcggctcctgcgacgcgcgccgggcgcggaagctgctggcgcccgacctcgagtggtggttccacggcccccccacgcgccagcacatgatgcgcctcctcaccggcgcggaccaccagcgccacatgagcggcggcggcggcggcgggttcgccttctccccgcgctccgtcgacgccttcgggtccaccgtcgtcgcggagggcggcgctgacgacgcgcgccagctctactgggtgcacgcctggaccgtggggcccgacggggtcattacccagctcagggagtacttcaacaccgacctcaccgtcaccctcctcgccggcactgcctccgccaagaaagctgctccgcctaagaagcagcaggacgctgcctcttcttctacctcctcctcctcacccccctcggctgcgtcgtcgtctgcagctgcagggtccaagtgcctgtggcagagccgccgcgccgacagcgcgcacaagtcgctgccgggcctcgtcctcgccatctgagactagagacagcaagatccatctaccctccattataagtttataaccttattacaaaagatcctaaaattcgaaactgttattgcataaataatctggaactgcactagttgtatgtactcggagtcggagtcagtcagtgaagacgtaatgacgatgcgcgtatggactgaactgctcgatcctccgtgttgtgacttgtgaggttcaggtgtcgtgtgtgctgctactgtaatgatcgactgttattgtccgagtctgctggatcatggatgtgatgtgatggtatatcgtggtggttaaataaaagtttcatgat

SEQ ID NO: 314 - protein, 203 aa, Zea mays
MGEPTRQELAEAALAGESAEQRNRFLVLRLYEALGSCDARRARKLLAPDLEWWFHGPPTRQHMMRLLTGADHQRHMSGGGGGGFAFSPRSVDAFGSTVVAEGGADDARQLYWVHAWTVGPDGVITQLREYFNTDLTVTLLAGTASAKKAAPPKKQQDAASSSTSSSSPPSAASSSAAAGSKCLWQSRRADSAHKSLPGLVLAI

SEQ ID NO: 315 - DNA, 1095 bp, Vitis vinifera
caccgcgtcctctgctcctctactcccctctccatccatcgcactcacacggtcacactcacacccccgccgtctagccgtttcagctgcagagcctctcgagcggcgcccgcggcaggagctggctacccctcgaccaggtctgggagcggcgccgccgcgcccgcacgagacggcggagctggacgcggaggcggcgctgggcggggagtcggcggaggagcgcaaccgcttcctggtgctgcggctgtacgaggcgctcaacgcccgcgacgcgcgccgggcgcaggagctgctggcgccggacctcgagtggtggttccatggccctcccgcgcgccagcacatgatgcgcctgctcaccggcgctctggaccaccgcggcttcgtcttctccccgcgctccgtcgacgccttcggctccaccgtcgtcgccgagggcgccgacgacgcgcgccagctctactgggtgcacgcctggaccgtggggccccatggggtgatcacgcagctcagggagtacttcaacaccgacctcacgctcctctccggccagcctgacgtcgttgccgcaggcgctgctccgcctaagcagaaggacgctgcctcctcctcgtcgccctcggtggcggcaccggcagcagggcccaagtgcctgtggcagagccgccgcgccgacagcgcgcacaagtcgctgccgggtctcgtcctcgccatctgactgagactagctagagacaccaagctcgatctgccgccctccattatattatattataaccgtataaaaatcctaaaattccaaaccctctactacttgcataaataatctggaactgcactcagtcagtgaaaacgtgaagacggacgtatgcctatgcactgaactgaactagtccgtgttgtgattcctgtaccagttaattactttagctcgtgccgtgccgtgccgtgtgtgtggaatagtagtgtttgttaagccatgggttgttatgctgtgcgccgccattgctgctactgtaatgctctgctgttatggtctggttctatattgcggttgaataaaagttgcatgagttggagggataagcaatt

SEQ ID NO: 316 - protein, 124 aa, Vitis vinifera
MMRLLTGALDHRGFVFSPRSVDAFGSTVVAEGADDARQLYWVHAWTVGPHGVITQLREYFNTDLTLLSGQPDVVAAGAAPPKQKDAASSSSPSVAAPAAGPKCLWQSRRADSAHKSLPGLVLAI

SEQ ID NO: 317 - protein, 17 aa, Artificial sequence
  motif 1
  VARIANT (3)..(3): / replace = "Gln"
  VARIANT (4)..(4): / replace = "Leu"
  VARIANT (12)..(12): / replace = "Leu"
  VARIANT (15)..(15): / replace = "Thr"
  VARIANT (16)..(16): / replace = "Arg"
  VARIANT (17)..(17): / replace = "Leu" / replace = "Phe"
ITRVREYFNTSVTVRDV

SEQ ID NO: 318 - protein, 15 aa, Artificial sequence
  motif 2
  VARIANT (1)..(1): / replace = "Arg"
  VARIANT (2)..(2): / replace = "Ser"
  VARIANT (3)..(3): / replace = "Ile" / replace = "Val"
  VARIANT (4)..(4): / replace = "Ser"
  VARIANT (6)..(6): / replace = "Ile"
  VARIANT (8)..(8): / replace = "Val"
  VARIANT (10)..(10): / replace = "Thr"
  VARIANT (12)..(12): / replace = "Thr"
  VARIANT (13)..(13): / replace = "Asp"
  VARIANT (15)..(15): / replace = "Gly" / replace = "Ile"
PRAYWVHAWAVEGGR

SEQ ID NO: 319 - protein, 15 aa, Artificial sequence
  motif 3
  VARIANT (1)..(1): / replace = "Ser"
  VARIANT (2)..(2): / replace = "Asn"
  VARIANT (3)..(3): / replace = "Arg"
  VARIANT (4)..(4): / replace = "Val" / replace = "Ala"
  VARIANT (5)..(5): / replace = "Gly"
  VARIANT (6)..(6): / replace = "Lys"
  VARIANT (8)..(8): / replace = "Leu"
  VARIANT (15)..(15): / replace = "Leu"
DDDDDRSVPGLVLAI

SEQ ID NO: 320 - DNA, 3325 bp, Artificial sequence
  expression cassette
aatccgaaaagtttctgcaccgttttcaccccctaactaacaatatagggaacgtgtgctaaatataaaatgagaccttatatatgtagcgctgataactagaactatgcaagaaaaactcatccacctactttagtggcaatcgggctaaataaaaaagagtcgctacactagtttcgttttccttagtaattaagtgggaaaatgaaatcattattgcttagaatatacgttcacatctctgtcatgaagttaaattattcgaggtagccataattgtcatcaaactcttcttgaataaaaaaatctttctagctgaactcaatgggtaaagagagagattttttttaaaaaaatagaatgaagatattctgaacgtattggcaaagatttaaacatataattatataattttatagtttgtgcattcgtcatatcgcacatcattaaggacatgtcttactccatcccaatttttatttagtaattaaagacaattgacttatttttattatttatcttttttcgattagatgcaaggtacttacgcacacactttgtgctcatgtgcatgtgtgagtgcacctcctcaatacacgttcaactagcaacacatctctaatatcactcgcctatttaatacatttaggtagcaatatctgaattcaagcactccaccatcaccagaccacttttaataatatctaaaatacaaaaaataattttacagaatagcatgaaaagtatgaaacgaactatttaggtttttcacatacaaaaaaaaaaagaattttgctcgtgcgcgagcgccaatctcccatattgggcacacaggcaacaacagagtggctgcccacagaacaacccacaaaaaacgatgatctaacggaggacagcaagtccgcaacaaccttttaacagcaggctttgcggccaggagagaggaggagaggcaaagaaaaccaagcatcctcctcctcccatctataaattcctccccccttttcccctctctatataggaggcatccaagccaagaagagggagagcaccaaggacacgcgactagcagaagccgagcgaccgccttcttcgatccatatcttccggtcgagttcttggtcgatctcttccctcctccacctcctcctcacagggtatgtgcccttcggttgttcttggatttattgttctaggttgtgtagtacgggcgttgatgttaggaaaggggatctgtatctgtgatgattcctgttcttggatttgggatagaggggttcttgatgttgcatgttatcggttcggtttgattagtagtatggttttcaatcgtctggagagctctatggaaatgaaatggtttagggtacggaatcttgcgattttgtgagtaccttttgtttgaggtaaaatcagagcaccggtgattttgcttggtgtaataaaagtacggttgtttggtcctcgattctggtagtgatgcttctcgatttgacgaagctatcctttgtttattccctattgaacaaaaataatccaactttgaagacggtcccgttgatgagattgaatgattgattcttaagcctgtccaaaatttcgcagctggcttgtttagatacagtagtccccatcacgaaattcatggaaacagttataatcctcaggaacaggggattccctgttcttccgatttgctttagtcccagaattttttttcccaaatatcttaaaaagtcactttctggttcagttcaatgaattgattgctacaaataatgcttttatagcgttatcctagctgtagttcagttaataggtaatacccctatagtttagtcaggagaagaacttatccgatttctgatctccatttttaattatatgaaatgaactgtagcataagcagtattcatttggattattttttttattagctctcaccccttcattattctgagctgaaagtctggcatgaactgtcctcaattttgttttcaaattcacatcgattatctatgcattatcctcttgtatctacctgtagaagtttctttttggttattccttgactgcttgattacagaaagaaatttatgaagctgtaatcgggatagttatactgcttgttcttatgattcatttcctttgtgcagttcttggtgtagcttgccactttcaccagcaaagttcatttaaatcaactagggatatcacaagtttgtacaaaaaagcaggcttaaacatggccatggagttggaagcggaggaggaggcgatgatgacggcgagggagaacgagaggctggtggagtcgctgtacgcggcggtggcggcgggggacggggcggcggcgtcggccgtgctggcgggcgacgtggactggtggttccacgggccgaggcggtgcgagcacatgcggcggcgcctgaccggggaggccgaggctgcgtcggcgtcgtccttcgtgttcgtgccgcggcaggtggcggcggtggggcgcggcggcgggtgggtggtggcggaagggtgggaggggccacgcgcgtactgggtccacgcctgggccgtcgagggcggccgcatcacccgcctccgcgagtacttcaacacctccgtcaccgtccgggacgtcggcggcggcggccactgccggccgcagctcgacggaggaggagttcgccggcgcgccgccgtgtgctggcagagccaacgtgggcgcggcggcggcgacgacgacgacgacaggtcgctgcctggcctcgtgctcgccatctacacgtgaacccagctttcttgtacaaagtggtgatatcacaagcccgggcggtcttctagggataacagggtaattatatccctctagatcacaagcccgggcggtcttctacgatgattgagtaataatgtgtcacgcatcaccatgggtggcagtgtcagtgtgagcaatgacctgaatgaacaattgaaatgaaaagaaaaaaagtactccatctgttccaaattaaaattcattttaaccttttaataggtttatacaataattgatatatgttttctgtatatgtctaatttgttatcatccgggcggtcttctagggataacagggtaattatatccctctagacaacacacaacaaataagagaaaaaacaaataatattaatttgagaatgaacaaaaggaccatatcattcattaactcttctccatccatttccatttcacagttcgatagcgaaaaccgaataaaaaacacagtaaattacaagcacaacaaatggtacaagaaaaacagttttcccaatgccataatactcgaac

SEQ ID NO: 321 - DNA, 2194 bp, Oryza sativa
aatccgaaaagtttctgcaccgttttcaccccctaactaacaatatagggaacgtgtgctaaatataaaatgagaccttatatatgtagcgctgataactagaactatgcaagaaaaactcatccacctactttagtggcaatcgggctaaataaaaaagagtcgctacactagtttcgttttccttagtaattaagtgggaaaatgaaatcattattgcttagaatatacgttcacatctctgtcatgaagttaaattattcgaggtagccataattgtcatcaaactcttcttgaataaaaaaatctttctagctgaactcaatgggtaaagagagagattttttttaaaaaaatagaatgaagatattctgaacgtattggcaaagatttaaacatataattatataattttatagtttgtgcattcgtcatatcgcacatcattaaggacatgtcttactccatcccaatttttatttagtaattaaagacaattgacttatttttattatttatcttttttcgattagatgcaaggtacttacgcacacactttgtgctcatgtgcatgtgtgagtgcacctcctcaatacacgttcaactagcaacacatctctaatatcactcgcctatttaatacatttaggtagcaatatctgaattcaagcactccaccatcaccagaccacttttaataatatctaaaatacaaaaaataattttacagaatagcatgaaaagtatgaaacgaactatttaggtttttcacatacaaaaaaaaaaagaattttgctcgtgcgcgagcgccaatctcccatattgggcacacaggcaacaacagagtggctgcccacagaacaacccacaaaaaacgatgatctaacggaggacagcaagtccgcaacaaccttttaacagcaggctttgcggccaggagagaggaggagaggcaaagaaaaccaagcatcctccttctcccatctataaattcctccccccttttcccctctctatataggaggcatccaagccaagaagagggagagcaccaaggacacgcgactagcagaagccgagcgaccgccttctcgatccatatcttccggtcgagttcttggtcgatctcttccctcctccacctcctcctcacagggtatgtgcctcccttcggttgttcttggatttattgttctaggttgtgtagtacgggcgttgatgttaggaaaggggatctgtatctgtgatgattcctgttcttggatttgggatagaggggttcttgatgttgcatgttatcggttcggtttgattagtagtatggttttcaatcgtctggagagctctatggaaatgaaatggtttagggatcggaatcttgcgattttgtgagtaccttttgtttgaggtaaaatcagagcaccggtgattttgcttggtgtaataaagtacggttgtttggtcctcgattctggtagtgatgcttctcgatttgacgaagctatcctttgtttattccctattgaacaaaaataatccaactttgaagacggtcccgttgatgagattgaatgattgattcttaagcctgtccaaaatttcgcagctggcttgtttagatacagtagtccccatcacgaaattcatggaaacagttataatcctcaggaacaggggattccctgttcttccgatttgctttagtcccagaattttttttcccaaatatcttaaaaagtcactttctggttcagttcaatgaattgattgctacaaataatgcttttatagcgttatcctagctgtagttcagttaataggtaatacccctatagtttagtcaggagaagaacttatccgatttctgatctccatttttaattatatgaaatgaactgtagcataagcagtattcatttggattattttttttattagctctcaccccttcattattctgagctgaaagtctggcatgaactgtcctcaattttgttttcaaattcacatcgattatctatgcattatcctcttgtatctacctgtagaagtttctttttggttattccttgactgcttgattacagaaagaaatttatgaagctgtaatcgggatagttatactgcttgttcttatgattcatttcctttgtgcagttcttggtgtagcttgccactttcaccagcaaagttc

SEQ ID NO: 322 - DNA, 53 bp, Artificial sequence
  primer: prm15407
ggggacaagtttgtacaaaaaagcaggcttaaacaatggccatggagttggaa

SEQ ID NO: 323 - DNA, 47 bp, Artificial sequence
  primer: prm15408
ggggaccactttgtacaagaaagctgggtcacgtgtcagatggcgag

SEQ ID NO: 324 - DNA, 1173 bp, Populus trichocarpa
atgggtcgtcctcccagtaatggcggtccttcctttcgcttcatgcagtatgaggtcacggagatggacgctattttgcaagaacaccataacatgatgccagctcgtgaggttcttgtatctcttgcagagaagttcagtgagtcttcagagcgaaaagggaagattcaagtgcaaatgaaacaagtttggaattggttccaaaatagacggtatgcaataagggcaaaatcaaataaggccccgatgaagttaaatataacacctatgcctcgcgatgattcagctgctgcgaggagtgtgcctcaacaagcagctgctcctatacctgatgctgtgccagccactacatctgcttcttcagctgctggtgccagaagggcaacttcagaaaactcttatatggaatttgaagccaaatctggtagagatggtgcatggtatgatgtaggaaccttccaatcccatagatacttggacaagggggatccggaagtattggttcggtttgctggttttggacctgatgaagatgagtggcttaatgtttgcaagcatgtcaggcagcgttctctcccttgcgaagcatcggaatgtgttgcagttcttcctggagacctcatactctgttttcaggaaggcaaagatcaggctctgtattttgatgctcatgttcttgatgcacaaagacgaagacatgatgtaagaggttgccgttgtaggtttttggtgcgttatgatcatgaccagtctgaggaaattgtgccactaaggaagatttgtcggaggcctgaaactgattataggctgctacaacttcatgctgcaaatgactcagcagctactgaccagcagaaaactagtgtagatccctccatagcaagtaccctgagggttgctgcttctgccacagaaacaatgctgcagcagcaacataacacaggtgtagcagctccggtttcccaagccaatgtttctcaacctgccaaaacaataattgcggagccaaaagaggctgcaaccctcagtgctgtcgattctggaaatcctagtttcatctccactgctgtgtttcccagcgttacggctaccgctgctgtgttggcgagtggaatggctacgagtaacggccctggtggctctggagagaacatgcagggaattaaattgtag

SEQ ID NO: 325 - protein, 390 aa, Populus trichocarpa
MGRPPSNGGPSFRFMQYEVTEMDAILQEHHNMMPAREVLVSLAEKFSESSERKGKIQVQMKQVWNWFQNRRYAIRAKSNKAPMKLNITPMPRDDSAAARSVPQQAAAPIPDAVPATTSASSAAGARRATSENSYMEFEAKSGRDGAWYDVGTFQSHRYLDKGDPEVLVRFAGFGPDEDEWLNVCKHVRQRSLPCEASECVAVLPGDLILCFQEGKDQALYFDAHVLDAQRRRHDVRGCRCRFLVRYDHDQSEEIVPLRKICRRPETDYRLLQLHAANDSAATDQQKTSVDPSIASTLRVAASATETMLQQQHNTGVAAPVSQANVSQPAKTIIAEPKEAATLSAVDSGNPSFISTAVFPSVTATAAVLASGMATSNGPGGSGENMQGIKL

SEQ ID NO: 326 - DNA, 1140 bp, Aquilegia sp.
atgggtagaccaccacatagtggaggccctgccttccgcttcacagcctctgaggttgctgagatggaagcatgtttacaagaatcaaataatgcagttccaactcgtgaagttttatctacttttgctgataaattcactaattcccctgaacgagctggaaagataattgtattaccaaaacaagtttggaattggtttcaaaataggaggtatgctcaaaaggctaaatcagttaaagctcctggcaaattgagtgtttctcctttgcctcgtgctgctgctgttgctggtgatgattcgattccaattactatcagaaatgttcctaattcaactttaccttttccttcttcagggaggagcgcaatggataacaacgttcaaatggagtttgaagcaaaatcagctagggatggggcatggtatgatgttgctacttttatctctcatagaatgtttgagacagctgatccggaagttcgagttcgatttgctggatttggtgcagaggaagatgagtgggttaatgtgcgcaagcatgtgagacagcggtctctcccttgtgaagcatcagaatgtgttgctgtgcttcctaaggaccttatactctgttttcaggaaggtaaagaccaagctctttactttgacgcacatgtcctcgatgcccaaagacggaggcatgacgtccgtggatgtcgttgcaggttcctagtgcgttatgatcatgatctgtccgaggagattgtgccactcagaaaagtctgccgtcgcccagaaacggattacagattgcatttgctacatgcttcgaaagagcaaggggccatggaactaaaaaacagcgggattattgctccaatcagcacatcgagggacaccagttccactattgaaaagggtcaaaagcaatgtaaacaggaggtaagtgcagaggaggtggttatgacatcaacaccaactcaatctaaagagttcgtggccaaagaaactacttcaaggaccagagacggagagagtaatggtatcaatatggaaaagaaagatgctccaattggtgatgctgccaaagctgttggtgttgcctcaggaactgttacagttgctggcacgggtgagaatatggaactggggaagtag

SEQ ID NO: 327 - protein, 379 aa, Aquilegia sp.
MGRPPHSGGPAFRFTASEVAEMEACLQESNNAVPTREVLSTFADKFTNSPERAGKIIVLPKQVWNWFQNRRYAQKAKSVKAPGKLSVSPLPRAAAVAGDDSIPITIRNVPNSTLPFPSSGRSAMDNNVQMEFEAKSARDGAWYDVATFISHRMFETADPEVRVRFAGFGAEEDEWVNVRKHVRQRSLPCEASECVAVLPKDLILCFQEGKDQALYFDAHVLDAQRRRHDVRGCRCRFLVRYDHDLSEEIVPLRKVCRRPETDYRLHLLHASKEQGAMELKNSGIIAPISTSRDTSSTIEKGQKQCKQEVSAEEVVMTSTPTQSKEFVAKETTSRTRDGESNGINMEKKDAPIGDAAKAVGVASGTVTVAGTGENMELGK

SEQ ID NO: 328 - DNA, 831 bp, Arabidopsis lyrata
atggctgctcccgatgattcctctcactatttcaccgagtttaccttggccgagattagagattcatgctttgtgatcttattatattgctcttcttctgcgaagattgtagacatggagaatctgtataaggagctcggtgatcaatctctccacaaagatttctgtcaaactgttgcttccacttttagctttatgtcttcttccattgtttctcaaagttgttctgtgaatcggaatggaaaatccacggtaacctggaaacagatacagagttggttccaggagaagctgaagcagcaatctcaacccaaattcaaaactttgccatctccccctttgcagattcatgacttatctaatcccagttgttatgctgcaaatgctacctttgttcaaacacgcaaaggtaaagcctctgatttagctgatctggcttttgaggctaaatcagcacgggactacgcgtggtatgacgtatcttcgttccttacttatagagttcttcgcactggtgaattggaagtgcgtgtacgcttttctgggttcgacaaccgacacgatgagtgggtgaacgtcaaaacatcagtgcgtgagcggtctattcctttagaaccatcagagtgtgggagagtgaatattggagacctgcttctatgtttccaagaaagggatgatcaagcattgtactgtgatggtcatgttgtgaatattaagagagggattcatgatcacaggagatgtaactgcgtgtttcttgttcgctacgaccttgacaatacagaggaaccgctgggattagaaaaaatttgccgccgccctgatgagtga

SEQ ID NO: 329 - protein, 276 aa, Arabidopsis lyrata
MAAPDDSSHYFTEFTLAEIRDSCFVILLYCSSSAKIVDMENLYKELGDQSLHKDFCQTVASTFSFMSSSIVSQSCSVNRNGKSTVTWKQIQSWFQEKLKQQSQPKFKTLPSPPLQIHDLSNPSCYAANATFVQTRKGKASDLADLAFEAKSARDYAWYDVSSFLTYRVLRTGELEVRVRFSGFDNRHDEWVNVKTSVRERSIPLEPSECGRVNIGDLLLCFQERDDQALYCDGHVVNIKRGIHDHRRCNCVFLVRYDLDNTEEPLGLEKICRRPDE

SEQ ID NO: 330 - DNA, 1047 bp, Arabidopsis thaliana
atgggtcgacctcccagtaatggcggtccggcgtttcgatttatcctgcctgaggtaacggagatggaagcaattttgctacagcataatacagcaatgccaggtcgacatattcttgaagctcttgctgataagtttagtgaatcacctgagcggaaggggaaagttgttgtgcagttcaagcaaatctggaactggtttcaaaataggcgatatgctttacgagcaaggggaaacaaagctcctgggaagctaaatgtatcttccatgccgcgtatggatttaccaaatcagatgagaagtgtgattcaaccattatcagttcctaaaaccactcatatgactggaaatttacccggcatgacgcctgccccttctggtagtttagttcccggtgtcatgaggagtggttcagacaactcttacttggaatttgaagccaaatctgccagggatggtgcatggtatgatgtgcaagctttcctagctcatagaaacttggagattggtgatccggaagtgcaggttcgatttgcgggtttcgaagttgaagaagatgaatggataaatgtcaaaaagcatgtaagacaacggtctctcccatgtgaagcatcagaatgtgttgcagttcttgctggagatctcgtcctttgtttccaggaaggaaaagatcaagctctttactttgacgccattgttcttgacgcacagagaagaagacatgatgtcagaggttgtcgttgtaggttcttggtgcgttacagccacgaccagtccgaggaaatcgttcccttgaggaagatttgtcggcggcccgagacagattacaggctacaacaacttcacaacgccgtaaacgatttggctaactcaaatcagcatcagatacccgctctagatgcggctgcaaaaacccctctgtcactacccggagctacagttcccattgttgcacccgagtcaaaagatccgagcctgagtgccactccagccactttggttcagcctagctccaatgcagctactgttcccgctggttcagcctag

SEQ ID NO: 331 - protein, 348 aa, Arabidopsis thaliana
MGRPPSNGGPAFRFILPEVTEMEAILLQHNTAMPGRHILEALADKFSESPERKGKVVVQFKQIWNWFQNRRYALRARGNKAPGKLNVSSMPRMDLPNQMRSVIQPLSVPKTTHMTGNLPGMTPAPSGSLVPGVMRSGSDNSYLEFEAKSARDGAWYDVQAFLAHRNLEIGDPEVQVRFAGFEVEEDEWINVKKHVRQRSLPCEASECVAVLAGDLVLCFQEGKDQALYFDAIVLDAQRRRHDVRGCRCRFLVRYSHDQSEEIVPLRKICRRPETDYRLQQLHNAVNDLANSNQHQIPALDAAAKTPLSLPGATVPIVAPESKDPSLSATPATLVQPSSNAATVPAGSA

SEQ ID NO: 332 - DNA, 1050 bp, Arabidopsis thaliana
atgggtcgacctcccagtaatggcggtccggcgtttcgatttatcctgcctgaggtaacggagatggaagcaattttgctacagcataatacagcaatgccaggtcgacatattcttgaagctcttgctgataagtttagtgaatcacctgagcggaaggggaaagttgttgtgcagttcaagcaaatctggaactggtttcaaaataggcgatatgctttacgagcaaggggaaacaaagctcctgggaagctaaatgtatcttccatgccgcgtatggatttaccaaatcagatgagaagtgtgattcaaccattatcagttcctaaaaccactcatatgactggaaatttacccggcatgacgcctgccccttctggtagtttagttcccggtgtcatgaggagtggttcagacaactcttacttggaatttgaagccaaatctgccagggatggtgcatggtatgatgtgcaagctttcctagctcatagaaacttggagattggtgatccggaagtgcaggttcgatttgcgggtttcgaagttgaagaagatgaatggataaatgtcaaaaagcatgtaagacaacggtctctcccatgtgaagcatcagaatgtgttgcagttcttgctggagatctcgtcctttgtttccaggaaggaaaagatcaagctctttactttgacgccattgttcttgacgcacagagaagaagacatgatgtcagaggttgtcgttgtaggttcttggtgcgttacagccacgaccagtccgagcaggaaatcgttcccttgaggaagatttgtcggcggcccgagacagattacaggctacaacaacttcacaacgccgtaaacgatttggctaactcaaatcagcatcagatacccgctctagatgcggctgcaaaaacccctctgtcactacccggagctacagttcccattgttgcacccgagtcaaaagatccgagcctgagtgccactccagccactttggttcagcctagctccaatgcagctactgttcccgctggttcagcctag

SEQ ID NO: 333 - protein, 349 aa, Arabidopsis thaliana
MGRPPSNGGPAFRFILPEVTEMEAILLQHNTAMPGRHILEALADKFSESPERKGKVVVQFKQIWNWFQNRRYALRARGNKAPGKLNVSSMPRMDLPNQMRSVIQPLSVPKTTHMTGNLPGMTPAPSGSLVPGVMRSGSDNSYLEFEAKSARDGAWYDVQAFLAHRNLEIGDPEVQVRFAGFEVEEDEWINVKKHVRQRSLPCEASECVAVLAGDLVLCFQEGKDQALYFDAIVLDAQRRRHDVRGCRCRFLVRYSHDQSEQEIVPLRKICRRPETDYRLQQLHNAVNDLANSNQHQIPALDAAAKTPLSLPGATVPIVAPESKDPSLSATPATLVQPSSNAATVPAGSA

SEQ ID NO: 334 - DNA, 759 bp, Arabidopsis thaliana
atggctgcttccgatgattcctctcactatttcaccgagtttaccttgtctgagattgtagacatggagaatctgtataaggagctcggtgaccaatctctccacaaagatttctgtcaaactgttgcctctacttttagttgttctgtgaatcggaatggcaaatcctctataacctggaaacaggtacagatttggttccaggagaagctgaagcatcaaagccaaccaaaatccaaaactttgccatctccccctttgcagattcatgacttatctaatcccagttcttatgcttcaaatgcctcaaatgctacctttgttgggaattctacctttgttcaaacacgaaaaggcaaggcctctgatttagctgatctggcttttgaggctaaatcagcgcgggactacgcgtggtatgacgtgtcttcgttccttacttatagagttcttcgcactggtgaactggaagtgcgtgtacggttttctgggttcgacaaccgacacgatgagtgggtaaacgtcaaaacatcagtgcgtgagcggtctattcctgtagaaccatcagagtgtgggagagtgaacgttggagacctgcttctatgtttccaagaaagagaggatcaagcactctactgtgatggtcatgttttgaatatcaagagagggattcatgatcacgcgagatgtaactgcgtgtttcttgttcgctacgagcttgacaatacagagtgtatgttcaggaatcgctgggactag

SEQ ID NO: 335 - protein, 252 aa, Arabidopsis thaliana
MAASDDSSHYFTEFTLSEIVDMENLYKELGDQSLHKDFCQTVASTFSCSVNRNGKSSITWKQVQIWFQEKLKHQSQPKSKTLPSPPLQIHDLSNPSSYASNASNATFVGNSTFVQTRKGKASDLADLAFEAKSARDYAWYDVSSFLTYRVLRTGELEVRVRFSGFDNRHDEWVNVKTSVRERSIPVEPSECGRVNVGDLLLCFQEREDQALYCDGHVLNIKRGIHDHARCNCVFLVRYELDNTECMFRNRWD

SEQ ID NO: 336 - DNA, 1029 bp, Brassica napus
atgggtcgacctccgagtaatggcagtccagcgttccgattcaacctcgctgaggtaacggagatggaagcagtattgaaacagcataacacagcaatgccaggtcgagatacacttgaagctcttgctgataagtttagtgacactgtggagcgcaaggggaaaactgttgtgcaattcaaacaaatatggaactggttccagaacaggcgatatgctttaagggcaagtagaaacaaagttcctgggaagctgaatgtatcttccatgccgcgcagtgtggatccaacaaacccaatgaggaacgtgcttccaccatcaaccggtcctaaaccccctcatatgattgggaatctatccgggatgacacctgcccctcccgctccaggtgtcatgaggagcggttcagacaattcttacttggaatttgaagccaaatctgccagagatggtgcatggtatgatgtacaagctttcctagctcatagaaacttggagattggtgatccggaagtgcaggttcgatttgcgggttttgaagttgaagaagatgaatggataaacgtcaagagacacgtaaggcaacggtcactcccatgtgaagcatcagaatgtgttgcagttcttgctggagatctcgtgctttgcttccaggaagggaaagatcaagctctttactttgacgccattgttctcgatgcacaaagaaggagacacgatgtcagaggttgtcgctgcaggttcttggtgcgttacagccacgaccagtccgaggaaatcgtccccttgaggaagatttgcaggcggccagagactgattacaggctacagcaactccacagtgctgccaatgactttgctaactccaaacccgctccagatgcggctgcaaaagctcctcttccaccatccaccgcctcagcccccattgttccacctgatgtgaaagatccgagcttgagcgccgcttcagctacttcagctcagcctagctccaatgcagccactgtcccaactggttctgcttag

SEQ ID NO: 337 - protein, 342 aa, Brassica napus
MGRPPSNGSPAFRFNLAEVTEMEAVLKQHNTAMPGRDTLEALADKFSDTVERKGKTVVQFKQIWNWFQNRRYALRASRNKVPGKLNVSSMPRSVDPTNPMRNVLPPSTGPKPPHMIGNLSGMTPAPPAPGVMRSGSDNSYLEFEAKSARDGAWYDVQAFLAHRNLEIGDPEVQVRFAGFEVEEDEWINVKRHVRQRSLPCEASECVAVLAGDLVLCFQEGKDQALYFDAIVLDAQRRRHDVRGCRCRFLVRYSHDQSEEIVPLRKICRRPETDYRLQQLHSAANDFANSKPAPDAAAKAPLPPSTASAPIVPPDVKDPSLSAASATSAQPSSNAATVPTGSA

SEQ ID NO: 338 - DNA, 771 bp, Brassica napus
atggatgctcccgaagattcctcccactatttcaccgatttcacattggccgagattgtagacatggagactctgttcaaggagctcggtgatcaatctctcctcaaagacttctgtcaaactgttgcctcctcttttagttgctcagtgaaccggaagggaaaatcatcaataacatggaaacaagtacagggttggtttcaggggagtttagagaagcaaaaccaaccaaaattcaagactgcgccatcttcccctttgctgattgttgacttatcaaatcccggtggtgtcagagatgctggaagtcctgaaactgttacctatggtcaaagagtgaaaggtaaggcctctgatgtatctgatctcgcttttgaggctaaatctgcaagggatgacgcgtggtatgacgtggcatcgttcatgacttatagatatcttcgcactggtgaactggaagtgcgtgtccggttttctgggttcgacaaccaacacgatgagtgggtgaacgtgcaaacgtcagtgcgtgagcggtctattcctgtagaaccatcagagtgtgggagagtgaaggttggagatctgcttctgtgttttcaggatagggaggatgaagcactgtactgtgatgctcatgttgtgaatatcaagagaggggttcatgatcacaggagttgtaactgcgtgtttgttgttcgctacgagtttgacggtacagaggaaccgctgggacttgaaagtatttgccgtcctcctgattctgaagagtga

SEQ ID NO: 339 - protein, 256 aa, Brassica napus
MDAPEDSSHYFTDFTLAEIVDMETLFKELGDQSLLKDFCQTVASSFSCSVNRKGKSSITWKQVQGWFQGSLEKQNQPKFKTAPSSPLLIVDLSNPGGVRDAGSPETVTYGQRVKGKASDVSDLAFEAKSARDDAWYDVASFMTYRYLRTGELEVRVRFSGFDNQHDEWVNVQTSVRERSIPVEPSECGRVKVGDLLLCFQDREDEALYCDAHVVNIKRGVHDHRSCNCVFVVRYEFDGTEEPLGLESICRPPDSEE

SEQ ID NO: 340 - DNA, 771 bp, Brassica oleracea
atggatgctcccgaagattcctcccactatttcaccgatttcacattggccgagattgtagacatggagactctgttcaaggagctcggtgatcaatctctcctcaaagacttctgtcaaactgttgcctcctcttttagttgctcagtgaatcggaagggaaaatcatcaataacatggaaacaagtacagggttggtttcaggggaggctagagaagcaaaaccaacccaaattcaagactgcgccatcttcccctttgctgattgttgacttatcaaatccaggtggtgtcagagatgctggaagtcctgaaactgttacctatggtcaaagagtgaaaggtaagacctctgatgtatctgatctcgcttttgaggctaaatctgctagggatgacgcgtggtatgacgtggcatcgttcatgacttatagatatctccgcactggtgaactggaagtgcgtgtccgattttccgggttcgacaaccaacacgatgagtgggtgaacgtgcaaacgtcagtgcgggagcggtctattcctgtagaaccatcagagtgtgggagagtgaaggttggagagttgcttctgtgttttcaggatagggaggatgaagcactgtactgtgatgctcatgttgtgaatatcaagagaggggttcatgatcacaggagttgtaactgcgtgtttgttgttcggtacgagtttgacggtacagaggaaacgctgggacttgaaagtatttgccgtcgtcctgattctgaagagtga

SEQ ID NO: 341 - protein, 256 aa, Brassica oleracea
MDAPEDSSHYFTDFTLAEIVDMETLFKELGDQSLLKDFCQTVASSFSCSVNRKGKSSITWKQVQGWFQGRLEKQNQPKFKTAPSSPLLIVDLSNPGGVRDAGSPETVTYGQRVKGKTSDVSDLAFEAKSARDDAWYDVASFMTYRYLRTGELEVRVRFSGFDNQHDEWVNVQTSVRERSIPVEPSECGRVKVGELLLCFQDREDEALYCDAHVVNIKRGVHDHRSCNCVFVVRYEFDGTEETLGLESICRRPDSEE

SEQ ID NO: 342 - DNA, 912 bp, Capsicum annuum
atggctgacttcatggaaacagaagaagaattattggatttcaccttagctgaggctatggaaatgaccaccttgtttaaaggattgaaagataaaccaatcagtcaagatatctgtcaacagcttgcaaccaagtttagttcttcaccatatcgtactggagaatcttcagtaaaatgggaacaggtgcaagcttggtttctggataagctaaaaccaaaagcagataaagcccccgttgatgataatgtagaaccggttgttgttcctaaaaaacgaggaagaaaaccaaaatctgaaaagacaagttcctctcttgtgctttacagaaaaccatacaatacttatggttacacaagactcccagattgtgcatatgacagtcctcaaaggcccaaagtttctgcagcagagatgggcaaagaactctcagggttggcttttgaagctctgtctgcaaaggatttagcttggtatgatgtggcttcatttctcaacttcagagttctttactcgggcgagcttgaagttcgagtaagatttgctggttttggtcatgaagaagatgaatgggtgaatgttaaaaggagagtacgtgaacgttctgttccattagagccatcagaatgtgacaggctgaacgttggagatgccgtgatgtgcttcagggaagatgaatacctcgcagtatatggtgacgctatggttgtggagatccaaaagaatatacatgatgatacaagatgcacatgcatctttgttgtccgctacgacttagataaggctgaggagaaagttgcacttgacaagatatgttgcagaccaaccttcatcaataacaacaacaacatgcccagtgaaattccacaagtggaggctgaggaagatatgatggacgttaactcgtcttag

SEQ ID NO: 343 - protein, 303 aa, Capsicum annuum
MADFMETEEELLDFTLAEAMEMTTLFKGLKDKPISQDICQQLATKFSSSPYRTGESSVKWEQVQAWFLDKLKPKADKAPVDDNVEPVVVPKKRGRKPKSEKTSSSLVLYRKPYNTYGYTRLPDCAYDSPQRPKVSAAEMGKELSGLAFEALSAKDLAWYDVASFLNFRVLYSGELEVRVRFAGFGHEEDEWVNVKRRVRERSVPLEPSECDRLNVGDAVMCFREDEYLAVYGDAMVVEIQKNIHDDTRCTCIFVVRYDLDKAEEKVALDKICCRPTFINNNNNMPSEIPQVEAEEDMMDVNSS

SEQ ID NO: 344 - DNA, 741 bp, Centaurea maculosa
atggagcttcgtcttcgttctagaggagaaaagaaggctttctctggctttacaacacccgagatggagaaaatggagagagttctaaaggaatcaggggaaaatgctctacggccggaggtctttaagaatttgacaagaggattcaaccgttctgcaggtcgtgccggaaaacctcttttaaagtggactgaggtccaaagttggttccttgataggcagcaaggtctcatgtcaaaagatacatcacttactggcacaaacaaattaccggctgcccaagaagcttgtgccttgaatgagacttctgatgtgtctaaaggagagaaagttctcgatatgtcaaagttggaattcgaggcaaagtcaacggatgatgcttggtatgatgtggagacttttattacacacagatttcttagttcaggcgaaccagaagttcttgtgagatatattggttttgggacagaagacgatgaatgggtccgtgtaaaaaacgtgcgtttacgatctgttcccctcgagcactacgaatgcaataaaatcacgatcggagatattgtactttgcttccaagagaaaacagatcaagcaagatactacgatgctcaagttatagatattcaacgcaagttgcatgatatacggggctgcagatgcattttttttcttcgctacgagcatgacaactcagaggaaagtgttgggttgaagagactgtgttaccggccggactattag

SEQ ID NO: 345 - protein, 246 aa, Centaurea maculosa
MELRLRSRGEKKAFSGFTTPEMEKMERVLKESGENALRPEVFKNLTRGFNRSAGRAGKPLLKWTEVQSWFLDRQQGLMSKDTSLTGTNKLPAAQEACALNETSDVSKGEKVLDMSKLEFEAKSTDDAWYDVETFITHRFLSSGEPEVLVRYIGFGTEDDEWVRVKNVRLRSVPLEHYECNKITIGDIVLCFQEKTDQARYYDAQVIDIQRKLHDIRGCRCIFFLRYEHDNSEESVGLKRLCYRPDY

SEQ ID NO: 346 - DNA, 741 bp, Centaurea solstitialis
atggagcttcgtcttcgttctagaggagaaaagaagctcttctctggctttacaacacccgagatggagaaaatggagagagttctaaaggaatcaggggaaaatgctctacggccagaggtcttcaagaatttgacaaaaggattcaaccgttctgcaggtcgtgctggaaaacctcttttaaagtggactgaggtccaaagttggttccttgataggcagcaaggtctcatgtcaaaagatacgtcgcttactggcacaaacaaattaccggctgcccaagaagcttgtgccttgaatgagacttctgatatgtctaaaggagagaaagttctcgatatgtcaaagctggaattcgaggcaaagtcaacggatgacgcttggtatgatgtggagacttttattacacacagatttcttagttcaggcgaacccgaagttcttgtaagatatattggttttgggacagaagacgatgaatgggcccgtgttaaaaatgtgcgtttacgatctgttcccctcgagcactacgaatgcaataaaatcatgatcggagatattgtactttgcttccaagagaaaacagatcaagcaagatactacgatgctcaagttatagatattcaacgcaagctgcatgatatacggggctgcagatgcattttttttcttcgctacgagcatgacaactcagaggaaagtgttgggttgaagagactgtgttaccggccggactattag

SEQ ID NO: 347 - protein, 246 aa, Centaurea solstitialis
MELRLRSRGEKKLFSGFTTPEMEKMERVLKESGENALRPEVFKNLTKGFNRSAGRAGKPLLKWTEVQSWFLDRQQGLMSKDTSLTGTNKLPAAQEACALNETSDMSKGEKVLDMSKLEFEAKSTDDAWYDVETFITHRFLSSGEPEVLVRYIGFGTEDDEWARVKNVRLRSVPLEHYECNKIMIGDIVLCFQEKTDQARYYDAQVIDIQRKLHDIRGCRCIFFLRYEHDNSEESVGLKRLCYRPDY

SEQ ID NO: 348 - DNA, 1113 bp, Fragaria vesca
atgggaaggcctccaagtaacggaggcccttcattccgcttcaatcaggctgaggttgctgagatggaagctattttgcatcaacacaataatacaatgccaacacgcgaacttctaatggaccttgcacagaagttcagtgaaacagcagagcgaaaaggcaaatttcaagtgcaaatgaagcaagtttggaattggtttcaaaataggcgatatgctattagagcaaaatcaagtaaggttcttgggaagttaaatgtttcacctatgcctcgagtggaatcaactccagtgagaactattcctcaaggcccccaacctatagctgcttctatacatgctccttcagttccaagctcagcaagggttccttctgaaaatcctatcttggagtttgaagctaaatccggaagggatgctgcatggtatgatgttgcaaactttttgtctcatagatctttggagagtggtgatccggacgtgctggtgcgttttgctggattcggaccagaggaggatgagtgggttaatgtccgaaagcatgtgaggcagcgctctcttccatgtgaatcatcagagtgtgttgcagttctccctggagacctcatactctgttttcaggaaggtaaagagcaggctttgtattttgatgccaatgtcctcgatgctcaaagacgaagacatgatgtaagaggttgtcgttgtaggtttttagtgcgctatgttcacgatcagtccgaggaaattgttccactgaggaaggtttgccgtcggcctgaaacggattaccggttgcatcagcttcatgctgaaaacaatacaacagcagcagagcagaaaagtacagatcattttaaggtgccttctacttctgctgaaatgatacaaaagcagcacaatccagtttttcatgttaatgcttctgtcgctccccaatcttcaactcctgaacttagaaaacccgagatgagcattgctatgagtgcaggaaatactagtggtcttcctggtagtggtggagtcgccagtggtagtgctcctgtactcacaagctgtactgctacggtcatctctcatggtggttctgttgggaacatgccaggagggaattag

SEQ ID NO: 349 - protein, 370 aa, Fragaria vesca
MGRPPSNGGPSFRFNQAEVAEMEAILHQHNNTMPTRELLMDLAQKFSETAERKGKFQVQMKQVWNWFQNRRYAIRAKSSKVLGKLNVSPMPRVESTPVRTIPQGPQPIAASIHAPSVPSSARVPSENPILEFEAKSGRDAAWYDVANFLSHRSLESGDPDVLVRFAGFGPEEDEWVNVRKHVRQRSLPCESSECVAVLPGDLILCFQEGKEQALYFDANVLDAQRRRHDVRGCRCRFLVRYVHDQSEEIVPLRKVCRRPETDYRLHQLHAENNTTAAEQKSTDHFKVPSTSAEMIQKQHNPVFHVNASVAPQSSTPELRKPEMSIAMSAGNTSGLPGSGGVASGSAPVLTSCTATVISHGGSVGNMPGGN

SEQ ID NO: 350 - DNA, 888 bp, Glycine max
atgggtcgtccacccagtaatgggggcccagcctttcgcttcacccagcctgaggtatcagaaatggaagctattcttcaagaacataacaatgctatgccgtcacgtgatgttcttacagctcttgcagagaaattcagtgaatcacaagatcgtaaaggcaagatttcagtgcagatgaagcaagtttggaattggtttcaaaataagcgatatgcgataagagcaaaatcaagtaagactcctgggaagttaaatattacacccatgcctcgggatgattacaattcaaccccaataaggagtatgcctcaacaaccaacagctgcttcaattcctgctgcttctgctacagttccaacagcagtaaaggcaactacagaaaattcagttatggaatttgaagctaaatctggaagggatggagcatggtatgatgtggctacctttctatcacacagatatttggaaaccagtgatccggaagtgctggtacgatttgctggttttggacctgaggaagatgagtggattaacattcgaaagcatgttaggccacgctcattgccttgtgaatcatcagaatgtgttgtagtcatccctggtgatctcatactttgttttcaggaaggtaaggagcaagccctatactttgatgcccatgtccttgatgctcaaaggagaaggcatgatgtacgaggctgtcgctgtagatttctagttcgttatgatcatgatcagtcagaggaaattgtgccgcttaggaagatttgtcgccggcccgaaaccgattatcggttacagcaacttcatgctgtgaatgaggcagcacctgtggatcagcagaagactggcatggatccagcagcaaattgccaaagcagctga

SEQ ID NO: 351 - protein, 295 aa, Glycine max
MGRPPSNGGPAFRFTQPEVSEMEAILQEHNNAMPSRDVLTALAEKFSESQDRKGKISVQMKQVWNWFQNKRYAIRAKSSKTPGKLNITPMPRDDYNSTPIRSMPQQPTAASIPAASATVPTAVKATTENSVMEFEAKSGRDGAWYDVATFLSHRYLETSDPEVLVRFAGFGPEEDEWINIRKHVRPRSLPCESSECVVVIPGDLILCFQEGKEQALYFDAHVLDAQRRRHDVRGCRCRFLVRYDHDQSEEIVPLRKICRRPETDYRLQQLHAVNEAAPVDQQKTGMDPAANCQSS

SEQ ID NO: 352 - DNA, 1110 bp, Glycine max
atgggtcgtccaccgagtaatgggggcccagcctttcgcttcactcagcctgaggtagcagagatggaagctattcttcaagaacataacaatgcaatgccatcacgtgatgttcttacaactcttgcagagaagttcagtgaatcacaagatcgtaaaggcaagattgcagtgcagatgaagcaagtttggaattggtttcaaaataagcggtatgcgataagagcaaaatcaagtaagactcctgggaagttaaatattacacctatgcctcggggggttccaacagcagtaaaagcaactccagaaaattcagttttggaatttgaagctaaatctggaagggatggagcatggtatgatgtggctacctttctatcacacagatatttagaaacaagtgatccggaagtgctggtacgatttgctggttttggacctgaggaagatgagtggattaacattcgaaagcatgtcaggccacgctctttgccttgtgaatcatcagaatgcgttgtagtcatccctggcgatctcatactttgttttcaggaaggtaaggagcaagccctttactttgatgcccatgtccttgatgctcaaagacgaaggcatgatgtacgaggctgccgttgtagatttctggttcgttatgatcatgatcagtcagaggaaatcgtgccgcttaggaagatttgtcgccggcccgaaaccgattatcgattacagcaacttcatgctgtgaatgaggcagcacctatggatcagcagaaaactgggatggatccagcagcaaatgttaatgccgtaagggctactactactgaaacagcagcaaatgttaatgccgtaagggccactactactgaaacagtgccgaagcagctgattgcagcaaacattcatatggagacagttccagttgtgcaaacaaatgttcctcaacctccacaaagtatggatatgggtgtggatcaaaagaaagctgaaacaaatactgatgttcaagcaggaaattccatcatcaccccaggcagtgtccttactaacatcattactacaagcggtgttcctaaagtctctagtcagactcagaacatggttgaatga

SEQ ID NO: 353 - protein, 369 aa, Glycine max
MGRPPSNGGPAFRFTQPEVAEMEAILQEHNNAMPSRDVLTTLAEKFSESQDRKGKIAVQMKQVWNWFQNKRYAIRAKSSKTPGKLNITPMPRGVPTAVKATPENSVLEFEAKSGRDGAWYDVATFLSHRYLETSDPEVLVRFAGFGPEEDEWINIRKHVRPRSLPCESSECVVVIPGDLILCFQEGKEQALYFDAHVLDAQRRRHDVRGCRCRFLVRYDHDQSEEIVPLRKICRRPETDYRLQQLHAVNEAAPMDQQKTGMDPAANVNAVRATTTETAANVNAVRATTTETVPKQLIAANIHMETVPVVQTNVPQPPQSMDMGVDQKKAETNTDVQAGNSIITPGSVLTNIITTSGVPKVSSQTQNMVE

SEQ ID NO: 354 - DNA, 696 bp, Glycine max
atggaccgcttgcgtcctaggaatcgagcggtcttttctggatttacaaatgccgagattgagaaaatggagaaattgttgagggaacctacgggggggtcattgggcaaggaattttaccaaaaactggctcgaagtttcaactattcctctggccgtgctggcaagcctatcataaaatggacagagattgagagttggtttcagactaggctccaagactcaccacaagtccctagcagtgagttgatggttcctaaatgcaaggaaggagaaactatgcaacacccatcagagttggaatttgaagcaagatcatcaaaagatggagcatggtatgatgttgaggcatttctagctcatagatttcttagcacaggggaagctgaagtccatgtcagatttgttggatttggagctgatgaagatgagtggatcaatatcaaaacttcagtacgccaacgctccattcctttggaaagcacagagtgttccaacctgaaaatgggagacccagtcctgtgcttccaggagaggagagatcaagcaatttactatgatgctcacattgtagagatccaaaggagaatgcatgatattagaggttgcagatgtctcatcttaattcgttatgatcatgacaacagtgaggaaagagttcgcttgaggagactttgccgcagatcaagatcttaa

SEQ ID NO: 355 - protein, 231 aa, Glycine max
MDRLRPRNRAVFSGFTNAEIEKMEKLLREPTGGSLGKEFYQKLARSFNYSSGRAGKPIIKWTEIESWFQTRLQDSPQVPSSELMVPKCKEGETMQHPSELEFEARSSKDGAWYDVEAFLAHRFLSTGEAEVHVRFVGFGADEDEWINIKTSVRQRSIPLESTECSNLKMGDPVLCFQERRDQAIYYDAHIVEIQRRMHDIRGCRCLILIRYDHDNSEERVRLRRLCRRSRS

SEQ ID NO: 356 - DNA, 696 bp, Glycine max
atggaccgcttgcgtcctaggaatcgagcggtcttttctggatttacaaatgccgagattgagaaaatggagaaattgttaagggaacctacagggggatcattgggcagggaattttaccaaaaactggctcgaagtttcaactattcctctggtcgtgctgggaagcctatcataaaatggacagagattgaaagttggtttcagactaggctccaagactcaccacaagtccctagcagtgagttgatggttcctaaatgtaaggaaggagaaactatgcaagacccatcagagttggaatttgaagcaagatcatcaaaagatggagcatggtatgatgttgaggcatttctagctcacagatttcttagcacaggggaagctgaagtccaagtcagatttgttggatttggagctgaggaagatgagtggatcaatatcaaaacttcagtacgtcaacgctctattcctttggaaagcacagagtgttccaacctgaaaattggagacccagtcctgtgcttccaggagaggagagatcaagcaatttactatgacgctcacattgtagagatccaaaagaggatgcatgatattagaggttgcagatgtctcctcttaattcattatgatcatgacaacagtgaggaaagagttcgcttgaggagactttgccgcagaccaagatcttag

SEQ ID NO: 357 - protein, 231 aa, Glycine max
MDRLRPRNRAVFSGFTNAEIEKMEKLLREPTGGSLGREFYQKLARSFNYSSGRAGKPIIKWTEIESWFQTRLQDSPQVPSSELMVPKCKEGETMQDPSELEFEARSSKDGAWYDVEAFLAHRFLSTGEAEVQVRFVGFGAEEDEWINIKTSVRQRSIPLESTECSNLKIGDPVLCFQERRDQAIYYDAHIVEIQKRMHDIRGCRCLLLIHYDHDNSEERVRLRRLCRRPRS

SEQ ID NO: 358 - DNA, 822 bp, Glycine max
atggaaaagctaggtttaactgaatctccattccccaagctctcttcagatgagattctggaattggaaagaatatacgaagacatgggaggaaaagtgctaaatcggaagtcatgcctggagattgctaaacgttttagttcctcatcaaatggtgctggtaaaacttccttatcatggcaacaggtgcggctgtggttcaaaaataatcagagaatgttactgggtaaagatatctcatcttctgacctgctgaaaatatctgctgatcttgcagagtcacctcttttaggaaatggaaaaggtaaacaagctgcagctctcgatgacctgggatttgaagcaagatctacaaaagacattgcatggcatgatgtttcaatgttccttaactacagagttctgagtacaggcgaacttgaagtccgcgtacgatatgctggatttgggaaagagcaggatgagtggatgaatgtgaaattgggggtgcgggagagatctattccattagaaccttcagagtgtcacaaggtgaaggatggagatcttgtactatgtttcctggaaagagaagattatgccctctattgtgatgctcgaattgtaaaaatccataggaagatacatgatccaacagagtgtacgtgcaccttcattgttcgattcgtccatgacaacactgaggaaggagtttcttttgacaggatatgctgtaggcctacacaagaggaatctgcttgctacccagatcttgcccttgatcccacctcaagtccctccttaaatgtcaccctaaataccatagagtccttgtggggataa

SEQ ID NO: 359 - protein, 273 aa, Glycine max
MEKLGLTESPFPKLSSDEILELERIYEDMGGKVLNRKSCLEIAKRFSSSSNGAGKTSLSWQQVRLWFKNNQRMLLGKDISSSDLLKISADLAESPLLGNGKGKQAAALDDLGFEARSTKDIAWHDVSMFLNYRVLSTGELEVRVRYAGFGKEQDEWMNVKLGVRERSIPLEPSECHKVKDGDLVLCFLEREDYALYCDARIVKIHRKIHDPTECTCTFIVRFVHDNTEEGVSFDRICCRPTQEESACYPDLALDPTSSPSLNVTLNTIESLWG

SEQ ID NO: 360 - DNA, 822 bp, Glycine max
atggaaaagctacctttaactgaatatccattccctaagctctctttagatgagattctggaattggaaagaatatacaaagatgtggtaggaaaagtgttcaatcggaagttgtgccaggagattgctaaacgttttagttcctcatcaaatggtgctggtaaaaattccttatcatggcaacaggtgcagctgtggttcagaaatagtcagagaatgttactgggtgaagatatctcatcttctgacctgctgaaaatatctgctgatcttgcagattcacctcttttaggcaatggaaaaggtaaacaagctacagatctcgatgatatgggatttgaagcacgatctacaaaagacaatgcatggcatgatgtttcaatgttccttaactacagagttctgagtacgggcgaacttgaagtccgcgtacgatatgctggatttgggaaagagcaggatgagtggatgaatgtgaaattgggggtacgggagagatctattccattagaaccttcagagtgtcacaaggtgaaggatggagatcttgtactatgtttcctggaaaaagaagattatgccctctattgtgatgctcgaattgtaaaaatccagaggaagatacacgatccaacagactgtacgtgcaccttcattgttcaattcgtccatgacaacactgaggaaggagtttcttttagcaggatatgctgtaggcctacacaagaggaatctgcttgcttcccagatcttgcccttgatcccacccaaagtccctccctaaatttccccctaaataccatagagtccttgtggggataa

SEQ ID NO: 361 - protein, 273 aa, Glycine max
MEKLPLTEYPFPKLSLDEILELERIYKDVVGKVFNRKLCQEIAKRFSSSSNGAGKNSLSWQQVQLWFRNSQRMLLGEDISSSDLLKISADLADSPLLGNGKGKQATDLDDMGFEARSTKDNAWHDVSMFLNYRVLSTGELEVRVRYAGFGKEQDEWMNVKLGVRERSIPLEPSECHKVKDGDLVLCFLEKEDYALYCDARIVKIQRKIHDPTDCTCTFIVQFVHDNTEEGVSFSRICCRPTQEESACFPDLALDPTQSPSLNFPLNTIESLWG

SEQ ID NO: 362 - DNA, 786 bp, Gossypium hirsutum
atggatcgtctacgcctaaggcagagacagagacaaagagcagccttctctgggtttacaaaacccgagatcaagaagatggagaaatttttaatgaaatcaagagagctactgctgagtaaggaattctgtaaaaaaatggctagaaatttcagttcatctgccggtcgtgctggcaaacctattattaaatggaccgaggtacaaagctggttcttagctaggctgcaagaaagcgcatctaaagttccttccttgactgatacctccaaaactgagtccagaatctctgaaacttgccctttagatgatgggcctcaaattcctcagattctcaaagtggtttcgaaaatgggagaaaagatccctgatctatcgggactagagttcgaggcacggtcatctaaagatggagcatggtatgatgtcgatacgtttctcacacaacgacatcccggttctggtgaacctgaagttcttgttagatttgttggatttggggccgatgaggatgaatgggttaatgtaaaaaaggcagtgcgacttcgatccatcccatttcaacattctgaatgtaataaggtgatggtcggagatcttgtattatgcttgcaggagaaaagggaccaattaatctactatgatgttcacgtcaatgaggtcgaaaggaaaacgcatgacataagaggttgcaggtgtatctttttaatccgatacgaccatgacggctctgaggagagagttcgattgagaagactattttatattcgaggccaagaaatctga

SEQ ID NO: 363 - protein, 261 aa, Gossypium hirsutum
MDRLRLRQRQRQRAAFSGFTKPEIKKMEKFLMKSRELLLSKEFCKKMARNFSSSAGRAGKPIIKWTEVQSWFLARLQESASKVPSLTDTSKTESRISETCPLDDGPQIPQILKVVSKMGEKIPDLSGLEFEARSSKDGAWYDVDTFLTQRHPGSGEPEVLVRFVGFGADEDEWVNVKKAVRLRSIPFQHSECNKVMVGDLVLCLQEKRDQLIYYDVHVNEVERKTHDIRGCRCIFLIRYDHDGSEERVRLRRLFYIRGQEI

SEQ ID NO: 364 - DNA, 1074 bp, Hordeum vulgare
atggggcggccgccgagcagcgggggcccagcgttccggttcacgcacgcggaggtggcggagatggaggagcacctgcgtcacctcaacaacgccatcccgcagcgcagcgtcatccagggcctcgccgagaagttcaccgcctccgcctcccgcaccggcaagatccccgtccagtacaagcaggtgtggaactggttccagaaccggaggtactcgcagcgggccaggacccccaggggcgcgccgccgccgcaggggaagatgctgcccacgggggccgaggagcaccacccggcctccttcagggctcaggggtcatcctcttcctaccccggatcccactcaggaaagagtgcttcggatggtggcatggccgagtttgaagcaaagtcagctagagatggcgcgtggtatgatgttgctgcctttctgtcccacaggctctttgaaacgggggacccggaagtaaaagttcgattttctggatttggacctgaggaggatgaatggattaatgttcgtaaatgtgtgaggctgcgttctcttccatgtgaatctgcagaatgtgttgctgtgcttcctggggatctcattctttgttttcaggaaggcaaagagcaggccctctattttgatgctcgtgttcttgatgctcaaaggcgcagacatgatgtaagagggtgccgctgcaggtttcttgttcgttatgatcatgatcactctgaggagattgttcctctgaggaaggtatgccgtcgaccagaaactgatttcaggctccagatcttgcacgcctctagagcggcggcggctgcagatgctcagaatgttagcccacctgagcagaaaccccaaaagccacacaagatgatggacgtgaacactgccgaggtgaccgtggttcccaacccagatcaaggagggccatctgacaagccggctgctcccttaccagctgcgcctactagcatccgcagtgattcagtttcagatgtgcagatggggaatgtagagattattccaaaagttgaagctgcaaatgaagcacaggacgacaagatgagcgtgtga

SEQ ID NO: 365 - protein, 357 aa, Hordeum vulgare
MGRPPSSGGPAFRFTHAEVAEMEEHLRHLNNAIPQRSVIQGLAEKFTASASRTGKIPVQYKQVWNWFQNRRYSQRARTPRGAPPPQGKMLPTGAEEHHPASFRAQGSSSSYPGSHSGKSASDGGMAEFEAKSARDGAWYDVAAFLSHRLFETGDPEVKVRFSGFGPEEDEWINVRKCVRLRSLPCESAECVAVLPGDLILCFQEGKEQALYFDARVLDAQRRRHDVRGCRCRFLVRYDHDHSEEIVPLRKVCRRPETDFRLQILHASRAAAAADAQNVSPPEQKPQKPHKMMDVNTAEVTVVPNPDQGGPSDKPAAPLPAAPTSIRSDSVSDVQMGNVEIIPKVEAANEAQDDKMSV

SEQ ID NO: 366 - DNA, 810 bp, Hordeum vulgare
atggagcgacgatccagcacccgcttctcgccctccgagattgcaaggatggagaagttggtttcagacaaaaaaggggaagtcttggttgatagtttctgccagaagcttgtagaagaatttaatcgttctgcagctcgagtcggaagtagagctctacaggctacacaggttcaaggatggttccttgataagctccctgcatcaactcctaaacctgcttgtttgcctgctacttctgaagaaaagcctttagcctcagaaccagatgcgttagtttctgagataaaggcttcagcttctgaagaaaaaaaaatagctcttgatacaagtatttcaaacaacgaggatgcactttctccggatttacctaaagagactacagataaggttcctgaatttgaagacttgcagtttgaggctaagtcatcaaaggattctgcatggtacgacgttgcccttttcttggcacacaggaagacaagtttgggagaagttgaagtccgggtgaggttcgtcggatatggggctgaagaagatgagtgggtgaatgtcaggaaagctgtccgccagcaatccattccattggaatcctcagaatgccgaagcattgtcaaaggagatcttgtcctgtgtttcaaggagagcaatgatgaagcactgcatttcgatgcgcacattgtggatgtccagtggaaacaacatgatataaggggatgcagatgcctcttcaccgttgaatatgatcatgatcaaagccaggagatggtgaacctcaagaggatctcccggcgaccaagatacctttga

SEQ ID NO: 367 - protein, 269 aa, Hordeum vulgare
MERRSSTRFSPSEIARMEKLVSDKKGEVLVDSFCQKLVEEFNRSAARVGSRALQATQVQGWFLDKLPASTPKPACLPATSEEKPLASEPDALVSEIKASASEEKKIALDTSISNNEDALSPDLPKETTDKVPEFEDLQFEAKSSKDSAWYDVALFLAHRKTSLGEVEVRVRFVGYGAEEDEWVNVRKAVRQQSIPLESSECRSIVKGDLVLCFKESNDEALHFDAHIVDVQWKQHDIRGCRCLFTVEYDHDQSQEMVNLKRISRRPRYL

SEQ ID NO: 368 - DNA, 783 bp, Ipomoea nil
atggatcttcgccccaggcagagacaacacttctctggtttcaccgaagctgagattcagaggatggacttcttacttagggactcaaaagaaaagggtttggaccaagacttctgcaagaaattggcaaaggttttcaaccggtccaaaggtcgtgcaggaaaacctattgtgaagtggacggaggtgcaaaattggtttcagaataggcagcaaaactgcctccaaacagatactccagctgatgccttcaaagtattgcctgatgatgttccagaaccaaaccatccagacaaagcaaaagaaaactctccggttcaaaaagttgtctacatcgctgaaaaagttccagatctgacagagttagaattcgaagctagatcttcaaaagacggggcatggtatgatattgattcttttctctctcacagatatctaagctcaggggatgctgaagttcttgtaagatttattgggttcggggaagaggaagatgaatggataaacattaggaagtcagtccgtgaacgttccattgctttggagcattcagagtgcaacaaagtgaggattggagatcgtgtattgtgctttcaggagaaaaaggagcaagcaagatactttgaagctcaagttactgaaattcaaaagagattgcatgatataagagggtgcagatgcctattcacaattcgatatgttcatgataacaccgaggaaacggttcggttgaggagattgtgtttccggcctagcatactggcccgctcagaggagacttag

SEQ ID NO: 369 - protein, 260 aa, Ipomoea nil
MDLRPRQRQHFSGFTEAEIQRMDFLLRDSKEKGLDQDFCKKLAKVFNRSKGRAGKPIVKWTEVQNWFQNRQQNCLQTDTPADAFKVLPDDVPEPNHPDKAKENSPVQKVVYIAEKVPDLTELEFEARSSKDGAWYDIDSFLSHRYLSSGDAEVLVRFIGFGEEEDEWINIRKSVRERSIALEHSECNKVRIGDRVLCFQEKKEQARYFEAQVTEIQKRLHDIRGCRCLFTIRYVHDNTEETVRLRRLCFRPSILARSEET

SEQ ID NO: 370 - DNA, 714 bp, Lactuca perennis
atggatcatcgtcttcgttctagaggagcaaagaaggtttactctgggttcacaacatccgagatggagaaaatggagaaagtactaaaagaatcaggggaaaatcctctaagtcctgatgtctgtaagatattggcaaaaggattcaatcgttcttcagggcgtgctggaaaacctatcttaaaatggaccgatgtacaaagttggtttattgaaaggcagcaaggtctcatgtcaagaaatacaaataaatcgccagctgtccaatatgttaatgagacttctgatatgtctaaaggagaaaaaattgtagatctttcaaagttggaattcgaggcaaaatcatcagataatgcatggtatgatgtggaagtattcatcacacatagatttatctcaagtggacctcaagttcttgtaagatatgttggatttggaacagaagaggacgaatgggtccatgtgaaaaatgttcgtgaaaggtctattcccattgagcattcagaatgccataaactcatgattggagacattgttctttgtttccaagagaaaacggatcaagcaagatattatgatgctcaagtgatggatattcaaaggaagttgcatgatataagaggctgcagatgcattttcttgattcgatatgaacatgatggatctgaggaaagtgttcggttgaagagactgtgtagccagccggaatattag

SEQ ID NO: 371 - protein, 237 aa, Lactuca perennis
MDHRLRSRGAKKVYSGFTTSEMEKMEKVLKESGENPLSPDVCKILAKGFNRSSGRAGKPILKWTDVQSWFIERQQGLMSRNTNKSPAVQYVNETSDMSKGEKIVDLSKLEFEAKSSDNAWYDVEVFITHRFISSGPQVLVRYVGFGTEEDEWVHVKNVRERSIPIEHSECHKLMIGDIVLCFQEKTDQARYYDAQVMDIQRKLHDIRGCRCIFLIRYEHDGSEESVRLKRLCSQPEY

SEQ ID NO: 372 - DNA, 696 bp, Lotus japonicus
atggaccgtttgcgtcctcggaacggagccaccttttctggattcacaaacgccgagattgagaaaatggacaagttatcaggtgaatcacagggacgatcgttcgaccgcgaattttaccagaagctcactgcatctttcaaccgctcgtctggtcgtgctgggaaacctactgtaaaatggaccgaggtacaaagttggtttcaggctagaattcaagacttaccagaagtccctgaaaataatttggagtcttctcaaggcaaatgtaaggaaggagaaactatccgagacccatcacagttggaatttgaagcgagatcaacaaaagatggagcatggtatgatgttgaggcatttttagcgcaccgatttgttggcacgggagaagctgaagtccgtgtcagatttgtgggatttggagcttcggaagatgagtgggtcaacataaaagattcagtccgagagcgctctgttccttttgaaagcacggactgttcctacctgaatgttggagatcctgtcctgtgcttccaggagaggagagatcaagcaatttactatgatgctcgtatattagagattcaaaggagaatgcatgatattagaggctgcaggtgtctcatcttagttcggtatgatcatgacaacactgaggaaagagttcgcttgaggagactttgtcgcagaccataa

SEQ ID NO: 373 - protein, 231 aa, Lotus japonicus
MDRLRPRNGATFSGFTNAEIEKMDKLSGESQGRSFDREFYQKLTASFNRSSGRAGKPTVKWTEVQSWFQARIQDLPEVPENNLESSQGKCKEGETIRDPSQLEFEARSTKDGAWYDVEAFLAHRFVGTGEAEVRVRFVGFGASEDEWVNIKDSVRERSVPFESTDCSYLNVGDPVLCFQERRDQAIYYDARILEIQRRMHDIRGCRCLILVRYDHDNTEERVRLRRLCRRP

SEQ ID NO: 374 - DNA, 873 bp, Nicotiana tabacum
atgggaagaccgccgagtaacggaggtcctactttccgtttcaacgccactgaggtcgctgagatggaagctatattgcaagcacataatgctacaatgccagctcgtgaagttctcgtagctcttgctgagaagtttagttcttcagcggagagatctggaaaaattatggttcaaatgaaacaagtttggaactggttccaaaatagacgatatgctattagagcaaaaacagctaaggttcctggtaaatttagtaccccgtcagtgcctcaaagtgattcagctatggtaagaactcctgcaaaattgagtgcgtcacctgtgcctcagagtgatccagctgcagtaaggattatgccccaagcttctcaacccatatcttctcctcaagtgaaatcaatgccccaagcgcctcaacctctacctgctccatcagtggcagcacaaaatgtgggcaggagtgcttcagataacattcaaatggagtttgaagctaaatctgcaagagatggtgcatggtatgatgtagcaagcttcctatcacatagatctgtggaaactgctgatccggaagtcctggttcgatttgcggggtttggagcagaggaggatgagtgggtaaatgtatgtaagcacgtaagacagcgatcccttccatgcgaatcgtcagaatgtgttgcagttctccctggtgatctgattctttgcttccaggaaggcaaagagcaggctctgtactttgatgcgcatgtccttgatgctcaaagacgcagacatgatgtgagaggttgccgttgtcggtttctggttcgttatgatcatgatcagtctgaggagattgttcctctgagaaagtttgtcgtcgcctga

SEQ ID NO: 375 - protein, 290 aa, Nicotiana tabacum
MGRPPSNGGPTFRFNATEVAEMEAILQAHNATMPAREVLVALAEKFSSSAERSGKIMVQMKQVWNWFQNRRYAIRAKTAKVPGKFSTPSVPQSDSAMVRTPAKLSASPVPQSDPAAVRIMPQASQPISSPQVKSMPQAPQPLPAPSVAAQNVGRSASDNIQMEFEAKSARDGAWYDVASFLSHRSVETADPEVLVRFAGFGAEEDEWVNVCKHVRQRSLPCESSECVAVLPGDLILCFQEGKEQALYFDAHVLDAQRRRHDVRGCRCRFLVRYDHDQSEEIVPLRKFVVA

SEQ ID NO: 376 - DNA, 768 bp, Nicotiana tabacum
atggaattggaacttcgacccagaaagagacaaattgggtctttctctggtttctcacaaactgagattgagaaaatggagaacttaatcaacgaatcaagtgaacaagtttgtgacccagaattctgcaagaaagtggcaaagacattcatgcgctctcaaggtcgtgcaggaaaaccgattgttaaatggactgaggtccaaacttggtttcagaacaagttgcaatgctgttcatcgaaggataattcagctgaggccaaccaaaaactgcctgacgtcacagaaagatgtgctttagataaagcaaatgaaagctctcatacggcaggccaaaaagttccatcgcaatcagaactagaatttgaggcgaggtcttcaagagatggggcatggtatgatgttgattcatttatctctcaccgatttcttaactctggagaacctgaggctcttgtgagatttgtgagccttggatcggaggaggatgaatgggtaaacataagaaaggcagtccgcgagcgctctgttactcttgaaaattcagagtgtaacaaactgaaggttggagatcttgttttgtgcttccaggagggaaagaaccaatcaaaatatcttgaagctcatgttatagagattcaaaagagattgcatgacataaggggctgcagatgtctctttgtgattcgatatggtcgtgatgacaccgaggaaacagttcgtttgaggcgattgtgtgttcgaccaagcatattagggcgtccttga

SEQ ID NO: 377 - protein, 255 aa, Nicotiana tabacum
MELELRPRKRQIGSFSGFSQTEIEKMENLINESSEQVCDPEFCKKVAKTFMRSQGRAGKPIVKWTEVQTWFQNKLQCCSSKDNSAEANQKLPDVTERCALDKANESSHTAGQKVPSQSELEFEARSSRDGAWYDVDSFISHRFLNSGEPEALVRFVSLGSEEDEWVNIRKAVRERSVTLENSECNKLKVGDLVLCFQEGKNQSKYLEAHVIEIQKRLHDIRGCRCLFVIRYGRDDTEETVRLRRLCVRPSILGRP

SEQ ID NO: 378 - DNA, 900 bp, Nicotiana tabacum
atggatgactccatggaaacagaagaagaattggccgagttcacattagctgaggctatgaaaatgacgaccttgtttaagcgaatgaaagaaaaaccaattagtcaagagttctgtcaaaaacttgcaacaaagtttagttgttcaccttatcgtactggaaaatctttcataaaatgggaacaggtgcaaacttggtttacggatgagcaaaaaacacaagcatctaaagcgattgttgttaagaaagaatctgatgttcctcgacctcgacaagcaaaaaaaccaaaatctaaaaagaaattttcagctctaatgctttccagaaaatacaatacttgcgggtacacaagactccccgaatgtgcatatgaccggcctcagaagcccagagtttctgcagcagagatggccacagagctcgcagagttgtcttttgaagctctttcagcaaaggatttagcttggtatgatgtggcctcatttctcaacttcagagttcttcgcacaggcgagcttgaagttcgtgtaagatttgctggctttggtcatgaagaagatgaatgggtgaatgttaaaaggagagtacgtgaacgttccgttcccttaaagccctcagaatgtgacagggtgaatgttggagatcccttgatgtgcttcagggaagatgaatatctcgcagtatatggtgatgcgcaagttgtggagatccaaaagaaattacacgataatacagaatgcacgtgtatctttgtcgtccgctacgacttggataatgctgaggagaaagttacacttgacaagttatgttgcagaccaaaccgaagcaacagtatactgcctgaaggtcgtgctaaattatgtgtcttgaacagtattgaccaagcaaatactcactag

SEQ ID NO: 379 - protein, 299 aa, Nicotiana tabacum
MDDSMETEEELAEFTLAEAMKMTTLFKRMKEKPISQEFCQKLATKFSCSPYRTGKSFIKWEQVQTWFTDEQKTQASKAIVVKKESDVPRPRQAKKPKSKKKFSALMLSRKYNTCGYTRLPECAYDRPQKPRVSAAEMATELAELSFEALSAKDLAWYDVASFLNFRVLRTGELEVRVRFAGFGHEEDEWVNVKRRVRERSVPLKPSECDRVNVGDPLMCFREDEYLAVYGDAQVVEIQKKLHDNTECTCIFVVRYDLDNAEEKVTLDKLCCRPNRSNSILPEGRAKLCVLNSIDQANTH

SEQ ID NO: 380 - DNA, 834 bp, Ocimum basilicum
atggatgatgagtgtgaggtgatggagggggccaatgatatagctgaattcacatttgcagagataatccaaatggagaacttatttaaggaaatgagagaggaaacagttggtgagcagttctgtcgggagctttctgcaaaatttaattgttcaatccaccgttctggaaagcccccagtaaaatgggaacaggtgcagagttggttccatgacaaacaagcaaatttgggggctgtagttgtgccgaaacccgagaagagaatcgctgcttcaaagactgctatagttaaaaagagggccaaagtgccgactattcctgcaagtgaagctgctgttgagctccatgccttggtttttgaagccagatcagctaaagattatgcttggtttgatgttgcttccttcctcagctacagaatccttcactctggggagatggttgttcgggtgagatttgctgggttcgggaaagaggaagacgaatgggtgagccttaatcgggcggtgcgcgagcggtcaatcccgctggaacattccgaatgcggtagagtgaatgtcggagattccgttctttgcttccgggaaaacgaggatcatgcgctctactgcgatgcacacgtgatagaaatcgagagaaatgttcatgacagcagctgctgcacctgcatttttgtggtttgtttcgaccatgatagtgttgaggcgagggttagggcggagaaattgtgttataggcccaccaaagtggttttgaaagatgagtgcgaagatgggcctaagctcatggagttgccgcccactggaatgcacaacatgctccagctcatgtga

SEQ ID NO: 381 - protein, 277 aa, Ocimum basilicum
MDDECEVMEGANDIAEFTFAEIIQMENLFKEMREETVGEQFCRELSAKFNCSIHRSGKPPVKWEQVQSWFHDKQANLGAVVVPKPEKRIAASKTAIVKKRAKVPTIPASEAAVELHALVFEARSAKDYAWFDVASFLSYRILHSGEMVVRVRFAGFGKEEDEWVSLNRAVRERSIPLEHSECGRVNVGDSVLCFRENEDHALYCDAHVIEIERNVHDSSCCTCIFVVCFDHDSVEARVRAEKLCYRPTKVVLKDECEDGPKLMELPPTGMHNMLQLM

SEQ ID NO: 382 - DNA, 1113 bp, Oryza sativa
atggggcggccgccgagcacggggggcccggcgttccggttcacccaggcggaggtggccgagatggaggcccgcctgcagcagctcaacaacgccatcccgcaccgctccgtcatccaggccctcgccgacaagttcacctcctcccccgcccgctccggcaaggtcgccgtccagcccaagcaggtgtggaactggttccagaaccggaggtactcgcaccgctccaggagctccaggggccccccgacgctgatgcagaccaagatgctgcccacggggtccgacgagcacaagtcgcctcccttcagggctatgccctctgcctctgcgcactccggctcgccctcagggaagggttctttggagagcggccaggttgaatttgaagcaaagtcggctagagatggcgcatggtatgatgttgctgccttcctgtctcatcggttgttcgaatctggtgatccagaagtacgagttcgcttttctggatttggagccgaggaagatgaatggataaatgtccgtaaatgtgtgcggcaacgttctcttccgtgtgaatcaactgaatgtgttgctgttcttcctggagacctcatactttgctttcaggaaggcaaagagcaggctctgtatttcgatgcttgtgtccttgatgctcaaaggcgtagacatgatgtacgagggtgtcgctgtagatttcttgttcgctacgatcatgatcactctgaggaaattgttccactgaggaaggtatgtcgccgaccagaaactgactacaggcttcagattctgcatgctgctagagcagcaggtatggctaaagaggctgtggttgatttggtgtcgcacaatgataagagctcagcggagcagaaacccccaaagcagcacaaaatgatggatgtgaacactgatgaggtaaccatggtttctaaccaagaccaagaagagccaacaggcaagcctgctgctaccttgccagcagcaccggtcaaaaccctgaatgattcagcttcagcttcagcttcagatgtccaaatgggcgaggcacaggctgctccaaaagttgaatcttctgatgaagtagaagacaagatgaaagagggatag

SEQ ID NO: 383 - protein, 370 aa, Oryza sativa
MGRPPSTGGPAFRFTQAEVAEMEARLQQLNNAIPHRSVIQALADKFTSSPARSGKVAVQPKQVWNWFQNRRYSHRSRSSRGPPTLMQTKMLPTGSDEHKSPPFRAMPSASAHSGSPSGKGSLESGQVEFEAKSARDGAWYDVAAFLSHRLFESGDPEVRVRFSGFGAEEDEWINVRKCVRQRSLPCESTECVAVLPGDLILCFQEGKEQALYFDACVLDAQRRRHDVRGCRCRFLVRYDHDHSEEIVPLRKVCRRPETDYRLQILHAARAAGMAKEAVVDLVSHNDKSSAEQKPPKQHKMMDVNTDEVTMVSNQDQEEPTGKPAATLPAAPVKTLNDSASASASDVQMGEAQAAPKVESSDEVEDKMKEG

SEQ ID NO: 384 - DNA, 810 bp, Oryza sativa
atggagcggcgatcgagcgttcgcttcgcgccatccgagattgcaaggatggagaagttggttacacataaaaaggaacaagtcttggatgaaattttctgccggaagctcgcagaagaatttaattgttctccaggccgagttggaagtaaagcactacaggctgtgcaggttcaagaatggttccgtcaaaagttccctgcatcaactgttatacctccttgtttgcctactggctctgaagaaaaggctttagcctcccaagcaagtgcaccggtttctgaagaaaagcctccatcatctgaagaaaatgctttagctgttgatacaagcatttcaaatgatataggcgaggtttcgccggatttacctatagacaacatagataagcttcctgaaattgaagacatgcagttcgaggctaggtcttcaaaggattttgcttggtatgatatcgccactttcttagcatacaggaagttaagttctggtgaatttgaagtccgagtgagatttcaaggatttggggctgaagaggatgaatggatcaatgtccggaaggctatccgcctgcaatccatcccgttggaatcatcagaatgcaaactcatcagggaaggagaccttgtcctctgtttcaaggagagcaatgatgaagcattgcatttcgatgcgcatgttctggaaatccagcggaaacaacatgatataagggggtgcagatgtgtcttccttgtcgaatacgaccatgatggaacccaggagagggtgaacctgagaagattgtcccggcggccaaagcactcctga

SEQ ID NO: 385 - protein, 269 aa, Oryza sativa
MERRSSVRFAPSEIARMEKLVTHKKEQVLDEIFCRKLAEEFNCSPGRVGSKALQAVQVQEWFRQKFPASTVIPPCLPTGSEEKALASQASAPVSEEKPPSSEENALAVDTSISNDIGEVSPDLPIDNIDKLPEIEDMQFEARSSKDFAWYDIATFLAYRKLSSGEFEVRVRFQGFGAEEDEWINVRKAIRLQSIPLESSECKLIREGDLVLCFKESNDEALHFDAHVLEIQRKQHDIRGCRCVFLVEYDHDGTQERVNLRRLSRRPKHS

SEQ ID NO: 386 - DNA, 1146 bp, Panicum virgatum
atgggtcgcccgcccagcaccggcgccccggcgttccgcttcctcccgtccgaggtggcggagatggaggcgcgcctgcagcagctcaacaacgccatccccacccgcgccgtgctccagaccctcgccgacaagttctccgcctcgcccgagcgcgccggcagggtcgccatccagcccaagcaggtgtggaactggttccagaacaggcgctactcgcaccgggccaagaccaccagggccgcgccgccgccggcggctaagatgacgccctcgggggccgaccacatccagcacgccgccaactcatccgccttcagggccgcccagccctctgctgccgctgcgcaccacggctcctccccctccgcagggaagaaccctgtggagggtgtccaggttgagtttgaagccaagtcagctcgagatggcgcatggtatgatgttgctgcgtttctgtcacataggttgtttgaatcaggggaaccggaagtacgggttcgtttttctggatttggagcagaggaagatgaatggatcaatgttcgtaaatgtgtgcgacagcgttctcttccgtgcgaggccactgaatgtgttgcggtgcttcctggggacctcattctttgctttcaggaaggtaaagagcaggctctctattttgatgcccgtgtccttgatgcccaaaggagaaggcatgatgtaagaggatgccgatgtagatttcttgttcgctatgatcatgactcttctgaggaaattgttccactgaggaaggtgtgtcgccgaccagaaactgattacaggcttcagattctgcatgcagccagagcggcagccaccattgattctcacaccccaccacccaaagaggtcaaagtggaggcgacatccaacgagaagagcccagctcagcagaaacccccgaagcagcacaagatgatggacgtgaacaccgatgaggtgtccatggtcgccagcgtggaacaagaagtgacaccaggcaagactgttgcccccttgccgtcagcaacaccagaaacccgcaattcaagttcagacgtcgtgatgaaggaagcggaggcttcctcggtgcttgaagacgatgatgaagtacaagtggttgaaaagatgaaagatggggagtag

SEQ ID NO: 387 - protein, 381 aa, Panicum virgatum
MGRPPSTGAPAFRFLPSEVAEMEARLQQLNNAIPTRAVLQTLADKFSASPERAGRVAIQPKQVWNWFQNRRYSHRAKTTRAAPPPAAKMTPSGADHIQHAANSSAFRAAQPSAAAAHHGSSPSAGKNPVEGVQVEFEAKSARDGAWYDVAAFLSHRLFESGEPEVRVRFSGFGAEEDEWINVRKCVRQRSLPCEATECVAVLPGDLILCFQEGKEQALYFDARVLDAQRRRHDVRGCRCRFLVRYDHDSSEEIVPLRKVCRRPETDYRLQILHAARAAATIDSHTPPPKEVKVEATSNEKSPAQQKPPKQHKMMDVNTDEVSMVASVEQEVTPGKTVAPLPSATPETRNSSSDVVMKEAEASSVLEDDDEVQVVEKMKDGE

SEQ ID NO: 388 - DNA, 1092 bp, Pinus taeda
atgggacggcctccgctgggaggagcaccctccttccgcttcttaccctcggagactgcagatatggaaaaagccctggaagaaagcaagggtgcaaatcctccacgtgatactgtcctttatcttgctgagaagttcagtgcagaacgagaacaacttggaaaattaactgtacaatggaagcagatttggaactggtttcagaatagaaggcatgcccagagatctaaaagtgctaagatggcagtgaagttaaattctatatcttcatcttctgatgattctcttgcgaagagagcctctactaattcttttgcttcactttcaggaagaaaggttccagatagtcaaaaaatggaatttgaggcaaggtctgcaagagatcaagcatggtatgatgttgctggtttccttactcatagaatgttggaactagatgatccagaagttcaagttagatttgaagggtttggagcagaagaagacgagtgggtcaatgtgaaacggtctgttcgtcgtcgttctcttccctgtgaagtttctgaatgcatagcagttttgcctggggacctcatactctgctttcaggaaggaaaagagcaagcactttactatgatgcccatgtattggatgttcaaagaaagcaacatgatatacggggttgtaggtgtcgatttttggttcaatatgaccatgatcagattgaggaggtagtacctctaaggaaagtttgccggcgtccagagacagactttcgtttgcaagcattacatgcttctaaaagatcatcatctactgagctcggacaagggctccaagaatcaaaagaaatttcaactggtaaaatttcttttgtttcatcaaaagagcctaaaggcattggcaactctatggagtctcataatcaacctgcagctatgccaatgatttcctttggtgatgcacttacttctgccaagtctcaaccatgccttccagatagtgcattaaactcaagtgaaagaggtggtaatccttctacatcctcttctattcctcaaattttggatcttaaagcagctgatgctgaaatgaaacttgttgatcaataa

SEQ ID NO: 389 - protein, 363 aa, Pinus taeda
MGRPPLGGAPSFRFLPSETADMEKALEESKGANPPRDTVLYLAEKFSAEREQLGKLTVQWKQIWNWFQNRRHAQRSKSAKMAVKLNSISSSSDDSLAKRASTNSFASLSGRKVPDSQKMEFEARSARDQAWYDVAGFLTHRMLELDDPEVQVRFEGFGAEEDEWVNVKRSVRRRSLPCEVSECIAVLPGDLILCFQEGKEQALYYDAHVLDVQRKQHDIRGCRCRFLVQYDHDQIEEVVPLRKVCRRPETDFRLQALHASKRSSSTELGQGLQESKEISTGKISFVSSKEPKGIGNSMESHNQPAAMPMISFGDALTSAKSQPCLPDSALNSSERGGNPSTSSSIPQILDLKAADAEMKLVDQ

SEQ ID NO: 390 - DNA, 783 bp, Pinus taeda
atgggacgaccccctcaacgcgaatctcagtattttcgttttacaaagaaagaagttgaacagatggaaaaagccctagaagaaatcaagggtgcaacccctgctcaggatgtcgtccagtcccttgccgagaagttcaatgctgcacctgaacgagctggaaaagttcctgtacaagcaaagcaggtattaggctggttcaaccacaagcgacggccacagaaagcaaaaggtgatctaatgccaatgccatcaaattctacgccttcacctcttaatgattgtcctgcaaaaagtgcaacagcaaattctgataaaataccctcagaaaaggagccttcagatgctcctgagtgggaatttgaggctcgatcttcgaaggatggagcttggtatgatgttgctactttccttacacataggatactagagtcaggtgaaccggaagtccgtgtgagatttgctggttttggggcagaagaagatgagtgggtcaacgtgagaaaggctgttcgtctacgttctcttccttgcgaggcaacagattgtgtggccattaagccaggagacctcatactttgttttcgggaaggcaaggaacagtctatctattttgatgcccatgtcttggatgtccaacgaaaacgccatgatgtacgggggtgtcgttgcaggtttttaattcgttatgaccatgaccaggctgaggaaagagtgcccttgcgaagagtttatcgccgtccggaggggttattttcttgggagtttgcagaaaatgtttaa

SEQ ID NO: 391 - protein, 260 aa, Pinus taeda
MGRPPQRESQYFRFTKKEVEQMEKALEEIKGATPAQDVVQSLAEKFNAAPERAGKVPVQAKQVLGWFNHKRRPQKAKGDLMPMPSNSTPSPLNDCPAKSATANSDKIPSEKEPSDAPEWEFEARSSKDGAWYDVATFLTHRILESGEPEVRVRFAGFGAEEDEWVNVRKAVRLRSLPCEATDCVAIKPGDLILCFREGKEQSIYFDAHVLDVQRKRHDVRGCRCRFLIRYDHDQAEERVPLRRVYRRPEGLFSWEFAENV

SEQ ID NO: 392 - DNA, 720 bp, Populus trichocarpa
atggattttgaattcacactttctgagatgctggaaatggagaatatgttcaaggaattagaggagggaccactagctccgcagttttgtgagaagcttgcaagcagctttagtttagcgccaagtcgtgatggaaagcaagccattacacctcgacaggttaaaagctggttccaggatagactaaagaagtcacaacctcgagttgcttcttcaaatatggctctcaaattattcgctgatctctctgatgcaagtgcttcttttggtgcaactgagagttcacaaaagctcaaaggcaatgcctctgatctttcagagttgatttttgaagctttgtcctcaaaagataatgcttggtatgatgttgcttctttcctcaactatagagttgtttgctctggtgaacttgaagtgcgagtaagatttgctgggtttcgtaatacagatgatgagtgggtgaatgtgagaagggcagtgcgggaacgatctattcctttagaatcttcagaatgtcagagggtcaaagttggtgatcttgtgctgtgctttcaggaaagagaagaacgagcagtatactgtgatgcccatattgtagagatcaacaggaaattacatgatataaatggttgtagatgcacctttgtagttcgttatgatcatgacgacttcgaggaagaagttcggttggataggttatgtggcagaccaacgccatag

SEQ ID NO: 393 - protein, 239 aa, Populus trichocarpa
MDFEFTLSEMLEMENMFKELEEGPLAPQFCEKLASSFSLAPSRDGKQAITPRQVKSWFQDRLKKSQPRVASSNMALKLFADLSDASASFGATESSQKLKGNASDLSELIFEALSSKDNAWYDVASFLNYRVVCSGELEVRVRFAGFRNTDDEWVNVRRAVRERSIPLESSECQRVKVGDLVLCFQEREERAVYCDAHIVEINRKLHDINGCRCTFVVRYDHDDFEEEVRLDRLCGRPTP

SEQ ID NO: 394 - DNA, 846 bp, Selaginella lepidophylla
atgggtcgtccaccacaagccgcgggcgttcccgttttccggtttcttccgcaagaggtttcggagatggagcgggtgctggaagcaaataatggtgtatccctacctcggcccggttgcgaagcacttgcggagaagtttagtaatgctccggaacgatttgggcaacttgtaattcagtggaggcaggtttggaactggtttcaaaaccggagacattcacagagggtgaagatggggaagggccagcttccacagcagcaccaggatcttgcaaaagctggaacttcaaccgcaacgccacttgttccaacgaggccggcaatcccagcgccgatgcctagtttcgtgcatcctcctccacaagaggaagagaaagaaatggaatttgaggcgaagtcttcgcgagatggagcttggtacgacgttgccatgttcttgtcttatagggacgagaccctgccggaggttcgagtcaggtttgctggttttgggccggaagaagacgaatgggtagatgtgagaacttccgtccggcaacgctctgttccttgcgaaatattggaatgcgttgtggtactcaagggagacgtgatcctgtgctttcaggagggaaacgagcaggctttgtactacgacgccctggttgtggacattcagaggcgtaggcacgacatgcgaggctgtcggtgccgattttgggtgcgctatcagcacgacggcacggaggaggttgttccactcaagaagatctgccgaagaccagagtcggactttcgattgcaacgaaatagaccaatgaggactgtagattctacccatgcatacgagagcttcaaagtgtaa

SEQ ID NO: 395 - protein, 281 aa, Selaginella lepidophylla
MGRPPQAAGVPVFRFLPQEVSEMERVLEANNGVSLPRPGCEALAEKFSNAPERFGQLVIQWRQVWNWFQNRRHSQRVKMGKGQLPQQHQDLAKAGTSTATPLVPTRPAIPAPMPSFVHPPPQEEEKEMEFEAKSSRDGAWYDVAMFLSYRDETLPEVRVRFAGFGPEEDEWVDVRTSVRQRSVPCEILECVVVLKGDVILCFQEGNEQALYYDALVVDIQRRRHDMRGCRCRFWVRYQHDGTEEVVPLKKICRRPESDFRLQRNRPMRTVDSTHAYESFKV

SEQ ID NO: 396 - DNA, 1641 bp, Selaginella moellendorffii
atggggcgcccgcctcaagccgccggcgtgccggtgtttcgatttcttccacaggaggtcgctcaaatggagagggcgctggaagctaacaacaacatagcgttgccaaggccggaatgtgacgacctcgcggaggctttcaccaatactccagaacgggctgggcaacttccaataacagggaaacaggtcttgaattggttccagaacaggaggcactcgcaaaaggcgaagaaaatcctccaaatgcagcagcaacagcagcaccaagacagcggtagaggctttactccctcgcctttggcgaacgccgcaagtcccatgcaatacatgtacgctccgccgccagaagtcgagaaagagatggacttcgaagccaaatcttctcgtgacggtgcctggtatgatgtatcattgtttctggcacatcgtatagaagcctctgagcacgaggtccgtgttcgttttgttgggtttggatccgaggaagacgaatgggtggacgtgaagacatcagtccggcagcgctctatgccgtgtgacgttgtggagtgcatggttgtccttccgggagatctcatcttatgcttccaggaaggaaacgagcaagccttgtactacgatgccacggttctggacatccagagacggaggcacgacttaagaggctgccggtgtcgattttgggtccgctatgatcacgatcaatcagagacggccagagacggatttacgaatccccaggaacaaacagcactaaagaagcgctgggccgaggagtttgctgctgcctcggcatccacctcctcgccgcagcaatcggcgtgcaatgtggtggcggagctggtggaatcgctggtggcgcagcgtcagcggcgcgaggttgcgctgcggctgcgcgaggcgctgcgtgatgtgaaggccaatttctccttcgccagggtcaagggccttcgccgtctgctcgcattcctgatgctcgccgctgcgtccgagaggggtgtggagctcttccgggagagccagagctatcaagaactccaagtgataccggcgttgttcaagcacacattggcaccgcaaaaatcaccagcgagcgcgccaccggtgtttaactcctcggaagaagcggcagaagtctcgaatcctcccacccctgcggagatcgtcctcgctcttcgcgttcttgagggatgctgcctcgtcgacaactcgagcaaagcggccgcggctcaccacatggccgtcaaggagctgcttgatctgctatcggcgactgggatcccggagcgcacggcttgcctggacgcgctcttggcactgttgctggattctcctgccaatcaaaaagaattcgaatactaccgaggtgtttcaaagatctgcgactcgctaaagaatcgccatgtcgacgtcgcactcaggacgaaatgcgccgagttcttgttgctgctcgtgggagacatactccccaagacggaggcgctgcaagatcaactcaaggagtggatgggcaccgagtgctgcgtcattctctgggacgtttactccaacctcgagcctgcctttgccgatccagagaggaaaaagaggtcgctcaaatcgctagcggagaagatgctaagccttgtagatagctaa

SEQ ID NO: 397 - protein, 546 aa, Selaginella moellendorffii
MGRPPQAAGVPVFRFLPQEVAQMERALEANNNIALPRPECDDLAEAFTNTPERAGQLPITGKQVLNWFQNRRHSQKAKKILQMQQQQQHQDSGRGFTPSPLANAASPMQYMYAPPPEVEKEMDFEAKSSRDGAWYDVSLFLAHRIEASEHEVRVRFVGFGSEEDEWVDVKTSVRQRSMPCDVVECMVVLPGDLILCFQEGNEQALYYDATVLDIQRRRHDLRGCRCRFWVRYDHDQSETARDGFTNPQEQTALKKRWAEEFAAASASTSSPQQSACNVVAELVESLVAQRQRREVALRLREALRDVKANFSFARVKGLRRLLAFLMLAAASERGVELFRESQSYQELQVIPALFKHTLAPQKSPASAPPVFNSSEEAAEVSNPPTPAEIVLALRVLEGCCLVDNSSKAAAAHHMAVKELLDLLSATGIPERTACLDALLALLLDSPANQKEFEYYRGVSKICDSLKNRHVDVALRTKCAEFLLLLVGDILPKTEALQDQLKEWMGTECCVILWDVYSNLEPAFADPERKKRSLKSLAEKMLSLVDS

SEQ ID NO: 398 - DNA, 888 bp, Selaginella moellendorffii
atggggaagccacccgcaatctccacagccaacaacacgcgctgtagatttctcccggaagaggtagcggagatggagaaattgttagtacaccacaatggactcactccatgccgcagcgtacaggaagccctcgcggaaaaattcagcaaaggagctgctcgcacgggtcatgctccagtccggccaaaacagctggataaagtcgatcaaggagcaggaccatcgtcctctggaagaagtatgatcaaatgcacggcagagcagctccttgctcaaagagcaaacgggcttcaattcgaggccatctccagcaaagatggtgcctggtacgatatcagatgttttcttggatataagctcaccgaaacgggaccggagatttttataagatacgctggactgggtggagacgaggatgaatgggtggagctcaagtccattcggaggagatcactaccgtgtgaaggattcgagtgtcttgcagtttatcccggagacaatgttctatgcttccaagaaggcgacgagcatgctctttactacgacgcgagggaagtggtgacgctgaggaaggtgtgtagaaggcccgagacggatgctcgcttgaagacccacttcgagagcagtgatggcagccagcaaaaaccacaagagaagttcgcaaacttcgaggacgatgaaggcgagcaagaagttgatcaagaacaaatccaagaagaagaagaggaccagcaacaagcagacgaggattatacgaaatcgtgtgtgtcaggtgtcgctggtggcttgtcaatcgatctaaacgccacgcctccagtggaagcatttgttctgcggcagtcttctggtggatcatttttgcaacctgagattagagcattataa

SEQ ID NO: 399 - protein, 295 aa, Selaginella moellendorffii
MGKPPAISTANNTRCRFLPEEVAEMEKLLVHHNGLTPCRSVQEALAEKFSKGAARTGHAPVRPKQLDKVDQGAGPSSSGRSMIKCTAEQLLAQRANGLQFEAISSKDGAWYDIRCFLGYKLTETGPEIFIRYAGLGGDEDEWVELKSIRRRSLPCEGFECLAVYPGDNVLCFQEGDEHALYYDAREVVTLRKVCRRPETDARLKTHFESSDGSQQKPQEKFANFEDDEGEQEVDQEQIQEEEEDQQQADEDYTKSCVSGVAGGLSIDLNATPPVEAFVLRQSSGGSFLQPEIRAL

SEQ ID NO: 400 - DNA, 765 bp, Solanum lycopersicum
atggatcttcgtcccagaaaacgacaagtacagtctattactggcttcacacaagctgagcaggttgagaagatggagaacttactaatcgaatcaagagaacaagtttgtgactcagaggtctgcaagaaattggcgaagacgttcacgcgctctaaaggacgtgctgggaaaccaattgctaagtggactgaggtccaagcttggttccagaataggttggtatgctcgtcaaaggataattcagctgaggacaaccaaaaactgcctgattatacagaaggatgcactttgaataaagcaaacgaaagctctcatattccaaaaggccagaaagatccagcattgtcagacatagaatttgaggctaggtcttcaaaagatggggcatggtacgacattgatacatttatcgctcaccggtttcttagctctgaagaacctgaggctcttgtgagatttgtgggctttgggttaggggaggatgaatgggtaaatgtaaggaaggcagtccgtgagcgttccgttgctcttgagaattcagaatgtaacaaagtacaggttggggatattattttgtgcttccaggagggtaaggaggaggaaaaatatcttgaagctcaagttatagaaatccaaaagaaattgcatgatataaggggctgcagatgtctctttgtgattcgatacactggcgatgacaccgaggaaacaattcgtttgaggcgaatgtgtgttcgaccaaacatattagggcgtccttga

SEQ ID NO: 401 - protein, 254 aa, Solanum lycopersicum
MDLRPRKRQVQSITGFTQAEQVEKMENLLIESREQVCDSEVCKKLAKTFTRSKGRAGKPIAKWTEVQAWFQNRLVCSSKDNSAEDNQKLPDYTEGCTLNKANESSHIPKGQKDPALSDIEFEARSSKDGAWYDIDTFIAHRFLSSEEPEALVRFVGFGLGEDEWVNVRKAVRERSVALENSECNKVQVGDIILCFQEGKEEEKYLEAQVIEIQKKLHDIRGCRCLFVIRYTGDDTEETIRLRRMCVRPNILGRP

SEQ ID NO: 402 - DNA, 915 bp, Solanum lycopersicum
atggatgatttgatggaaacagatgaagaattaatggatttcaccttagctgaagctatggaaatgaccactttctttaaaggattgaaaggaaaatcaatcagtcaagagttgtgtcaagaatttgctaacaagtttagttcttcaccatttcgtactgggaaatctataataaaaggggaacaggtgaaaagttggtttcttgataagcaaaaaccgaaagcagctgaagtccctgatgatgattatgtagaacatgttgatgattacgaagaacctattgttcctaaacgacgaggaagaaaaccaaaatctaaaaacacaagttcatctctggtggtctacaaaaaatacgatgcttgtggttacacaagactcccagaatgtgcatatgacttgcctcagaggcccagagtttctgcagcagagatggccaaagaactcagagggttgtcttttgaagctctgtcagcaaaggatttagcttggtatgacgtgggctcatttctcaacttcagagttctttacacgggcgagcttgaagttcgtgtaagatttgctggctttggtaatgaagaagatgaatgggtgaatgttaaaaggggagtacgtgaacgttctgttcccttagagccctcagaatgtgtcaagctgagtgttggagatcctgtgatgtgcttcagggaagatgaatatctcgcagtatatggtgacgcagaggttgtggagatccaaagaaatctacatgataatacaagatgcacgtgcatctttgtcgtccgctatgacttagataaggctgaggagaaaattgtactggacaagatatgttgcagaccgaacttcatcaataacaagaacaagaacaacaacgacaacacacccactgaaatttccaccacaagtggagtctga

SEQ ID NO: 403 - protein, 304 aa, Solanum lycopersicum
MDDLMETDEELMDFTLAEAMEMTTFFKGLKGKSISQELCQEFANKFSSSPFRTGKSIIKGEQVKSWFLDKQKPKAAEVPDDDYVEHVDDYEEPIVPKRRGRKPKSKNTSSSLVVYKKYDACGYTRLPECAYDLPQRPRVSAAEMAKELRGLSFEALSAKDLAWYDVGSFLNFRVLYTGELEVRVRFAGFGNEEDEWVNVKRGVRERSVPLEPSECVKLSVGDPVMCFREDEYLAVYGDAEVVEIQRNLHDNTRCTCIFVVRYDLDKAEEKIVLDKICCRPNFINNKNKNNNDNTPTEISTTSGV

SEQ ID NO: 404 - DNA, 924 bp, Solanum tuberosum
atggatgacttgatggaaacagatgaagaattaatggatttcaccttagctgaggctatggaaatgaccactttctttaaaggattcaaaggaaaatcaatcagtcaagagttgtgtcaagaatttgctaccaagtttagttcttcgccatttcgtactgggaaatctttaataaaaggggaacaggtgcaaagttggtttcttgataagaaaaaaccaaaagcagctgaagtccctgttgatgattatgtagaacatgttgatgattatgatgaacctgttgttcctaaacgacgaggaagaaaaccaaaatctaaaaacacaagttcatctctggtggtctacaaaaaatacgatgcttgtggttacacaagactcccagaatgtgcatatgacatgcctcagaggcccagagtttctgcagcagagatggccaaagaactcacagggttggcttttgaagctctgtcagcaaaggatttagcttggtatgatgtggcctcatttctcaacttcagagttctttacacgggcgagcttgaagttcgtgtaagatttgctggctttggtaatgaagaagatgaatgggtgaatgttaaaaggggagtacgtgaacgttctgttcccttagagccctcagaatgtgtcaagctgagcgttggagatcctgtgatgtgcttcagggaagatgaatatctcgcagtatatggtgactcagaggttgtggagatccaaaggaatctacatgatattacaagatgcacgtgcatctttgttgtccgctatgacttagataaggctgaggagaaaattacactcgacaagatgtgttgcagaccaaacttcacctataacaagaacaacaacaacgacaacacacccagtgaaattccactagtggagtctgaggaggataggatgtag

SEQ ID NO: 405 - protein, 307 aa, Solanum tuberosum
MDDLMETDEELMDFTLAEAMEMTTFFKGFKGKSISQELCQEFATKFSSSPFRTGKSLIKGEQVQSWFLDKKKPKAAEVPVDDYVEHVDDYDEPVVPKRRGRKPKSKNTSSSLVVYKKYDACGYTRLPECAYDMPQRPRVSAAEMAKELTGLAFEALSAKDLAWYDVASFLNFRVLYTGELEVRVRFAGFGNEEDEWVNVKRGVRERSVPLEPSECVKLSVGDPVMCFREDEYLAVYGDSEVVEIQRNLHDITRCTCIFVVRYDLDKAEEKITLDKMCCRPNFTYNKNNNNDNTPSEIPLVESEEDRM

SEQ ID NO: 406 - DNA, 1146 bp, Sorghum bicolor
atgggtcgtccgccgagcaccaccggtgctccggcgttccgcttcctcccgtccgaggtggcggagatggaggcccgcctgcagcagctcaacaacggcatcccttcccgcggcgtgctccagaccctcgccgataagttctccgcctcgcctgagcgcgccggcaaggtggccatccagcccaagcaggtgtggaactggtttcagaacaggcgctactcgcaccgtgccaagtccaccagggccgtgccgtcgccgccggctaagatgacgccctcgggggccgatcaccaccagcacgccgccaacgcctccgccttcagggccgctcagccctcttctgtcgctgctgctcaccatggcgcctccccaacagggaagaaccctgtggaaggtgtctcggttgagtttgaggccaagtcagcccgtgatggtgcatggtatgatgttgctgcctttctgtcacaaaggttgtttgaaactggtgaaccggaagtgcgggttcgtttttctggatttggggctgaggaggatgaatggatcaacgttcgcaaatgtgtgcgacaacgttctcttccatgcgaggccacagaatgtgttgctgtgcttcctggggacctcattctttgttttcaggaaggtaaagagcaggctctctattttgatgctcgtgtccttgatgctcaaaggagaaggcatgatgttagaggctgccgttgtagatttcttgttcgctatgatcatgattcttctgaggaaattgttccactgaggaaggtgtgccgccgaccagatactgactacaggcttcagattctgcatgctgctagagtggcagccacgaatgcagatattcacactccacccaaagagattaaagtggagttgacatccaatgataaaagcccaaccgagcagaaaccccagaagcagcacaagatgatggacgtgaatactgatgaggtgaccatggtgtccaccttggaacaagacgagacacaaggcaagactgtcgcccccttaccgtcatcaactgtagaaacccgcaattcaagttcagatgcggtgatgaaggatgcggaggcttcctcggtggttgaagatgacgacgaagttcaggtggttgacaagatgaaagagggctag

SEQ ID NO: 407 - protein, 381 aa, Sorghum bicolor
MGRPPSTTGAPAFRFLPSEVAEMEARLQQLNNGIPSRGVLQTLADKFSASPERAGKVAIQPKQVWNWFQNRRYSHRAKSTRAVPSPPAKMTPSGADHHQHAANASAFRAAQPSSVAAAHHGASPTGKNPVEGVSVEFEAKSARDGAWYDVAAFLSQRLFETGEPEVRVRFSGFGAEEDEWINVRKCVRQRSLPCEATECVAVLPGDLILCFQEGKEQALYFDARVLDAQRRRHDVRGCRCRFLVRYDHDSSEEIVPLRKVCRRPDTDYRLQILHAARVAATNADIHTPPKEIKVELTSNDKSPTEQKPQKQHKMMDVNTDEVTMVSTLEQDETQGKTVAPLPSSTVETRNSSSDAVMKDAEASSVVEDDDEVQVVDKMKEG

SEQ ID NO: 408 - DNA, 900 bp, Sorghum bicolor
atggagcggcggtccgtccgcttcgtgccagccgagattgcaaggatggagaaattggctgcagatagaaacgagcaagtctttgataacaagttctgccagaagcttgcagaagaatttaatcgttctgctggccgtgctggaagtaaagcgttacaggctacacaggttcaaggatggttccttaataagtttccagcatcagccactaaacctacttgtgtgcccactgcttgccaagaaaagactccagcctcagaagtaaatgtatcagtttctgaaaaaagatctgcagcttctgaagaaaaacttgtgtgcccactgcttcccaagaaaagtacttcagcctcagaagtaaatgtatcagtttctaaaaaaagatctgcagcttctgaagaaaaacttttccctcctgatacaagtgtttcaaacaatgaggatgaggtttctcctgttttttcattagaaactagagatatgattcctgaacttgatgacctggagtttgaagccaagtctgcaaaggattctgcctggtatgacattgccatgttcttggcacataggacgaacaaggcgggtgaagtagaagtccgggtgagattcgagggttttggggctgatgaggatgagtgggtgaatgtcaagaagttcatccgccagcgttccattcctctggagtcctcacagtgcaaaagcattgttgaaggagaccttgtcctctgcttcagggagggaaacgacgaggcattgcatttcgatgcgcatgttcttgaggttacgcggaagcagcatgatattagggggtgcagatgtgtattccttattgaatacgatcatgaccaaagccaggagagggtgagcctgagaagattgtcccggcggccaaagtacttctga

SEQ ID NO: 409 - protein, 299 aa, Sorghum bicolor
MERRSVRFVPAEIARMEKLAADRNEQVFDNKFCQKLAEEFNRSAGRAGSKALQATQVQGWFLNKFPASATKPTCVPTACQEKTPASEVNVSVSEKRSAASEEKLVCPLLPKKSTSASEVNVSVSKKRSAASEEKLFPPDTSVSNNEDEVSPVFSLETRDMIPELDDLEFEAKSAKDSAWYDIAMFLAHRTNKAGEVEVRVRFEGFGADEDEWVNVKKFIRQRSIPLESSQCKSIVEGDLVLCFREGNDEALHFDAHVLEVTRKQHDIRGCRCVFLIEYDHDQSQERVSLRRLSRRPKYF

SEQ ID NO: 410 - DNA, 1014 bp, Triticum aestivum
atgacggggcaggcgccaagtctcctgttccggttcaccgacacggaggtcgccaagatggaggaggtcctccgtgacctcaacgccatgcccaagcatcctgtcatccagggcctcaccgacgacttcaacgcctccccggaccgctccggcgacggcaaggtccccgtccagtacaatcaggtgaggaattggttccagaaccggaggtccgcgcagtccaggaagatgatggtgcccccagtggccgaggaacaccacccagtggacggatcatactcagggaatagttctttggatggtggccatgtccagtttgaggcaaagtcagcaatcaatggcgcatggtacgatgttgctgcctttctgtcccacaggttcattggaacaaaggacccggaagtactagttcgatttacttggcttggacccgaggaggatgaatggattaatgttcgtaaatgtgtgaggctgcgttctcttccatgtgaagctgcagaatgtgttgctgtgcttcctggggatctcattctttgttttcaggaaggcaaagagcaggccctctattttgacgctcgtgttcttgatgctcaaaggcgcaggcatgatgtaagagggtgccgctgcaggtttcttgttcgttatgatcatgatcactctgaggagattgttcctctgaggaaggtatgccgtcgaccagaaactgatttcaggctccagatcttgcacgcatctagagcggcggcctctgcggatgctcagaatgttagcccagttgagcagaaaccccaaaaggcgcacaagatgatggatgtgaacactgccgaggtgaccgtggttcgcaacccagatcaaggagggccatctgacaagccggctgctcccttaccagctgcgcctgctggcacccacggtgattcagtttcagatgtgcagatggggaatgtggaggttattccaaaagttgaagctgcaaatgaagcacatgatgacaacatgaacgtgggagcgtag

SEQ ID NO: 411 - protein, 337 aa, Triticum aestivum
MTGQAPSLLFRFTDTEVAKMEEVLRDLNAMPKHPVIQGLTDDFNASPDRSGDGKVPVQYNQVRNWFQNRRSAQSRKMMVPPVAEEHHPVDGSYSGNSSLDGGHVQFEAKSAINGAWYDVAAFLSHRFIGTKDPEVLVRFTWLGPEEDEWINVRKCVRLRSLPCEAAECVAVLPGDLILCFQEGKEQALYFDARVLDAQRRRHDVRGCRCRFLVRYDHDHSEEIVPLRKVCRRPETDFRLQILHASRAAASADAQNVSPVEQKPQKAHKMMDVNTAEVTVVRNPDQGGPSDKPAAPLPAAPAGTHGDSVSDVQMGNVEVIPKVEAANEAHDDNMNVGA

SEQ ID NO: 412 - DNA, 969 bp, Triphysaria sp.
atgggccgaccgccgagcaatggaggtccctccttccgctttaacgccgccgaggttggggaaatggaggcgattttgctagcacacaattgcgtagtgccagcacgtgaaactattgaggctctttcccagaggtttagtgccacaggtgaacgagccggaaaagttgaagtttcatttaaacaagtcttaaactggttccaaaacaggcgatatgctatccgagcaaaagcagctagggtgcccgttcctggtgagacgaacatctatcatatgcctcacaatggtcgagctgcggttctcaatgtgcctcaggctcctcagcatcagcctcaacctcagttcactcccacaagtgcaactaaagaaactcctataatggaatttgaagccaagtcttctagagatggggcatggtatgatgttacttatttcctgtcgtacagatcattagagactagagagccggaagctctagttcgttttgccggttttggaccagaagaggatgaatgggtcaatatccgcaggcatgtgagacaacgatcactaccgtgtgaatcttcagaatgtgtagccgttctacctggggatttggccctatgctttcaggaaggaaaagagcaagccctatattttgatgcacacgttcttgatgcacaaaggcggaggcatgacgtaagaggctgtcgttgtaggtttctggtgcgatatgatcacgatgaagctgaggaaatagttcccctcaggaagatatgccgtcggcccgatactgattataggatgcagcaactaagcgccatgcccactaacgtgaacgcacaacctgggttgaaagttgatgctacaggcgaaacaacacaaagccagcccaagcccgagggccgtgttgattttggagctgtcactctagccaatgtttccataccatcacctgaacttaaatccgaaacgttgttgcattcctga

SEQ ID NO: 413 - protein, 322 aa, Triphysaria sp.
MGRPPSNGGPSFRFNAAEVGEMEAILLAHNCVVPARETIEALSQRFSATGERAGKVEVSFKQVLNWFQNRRYAIRAKAARVPVPGETNIYHMPHNGRAAVLNVPQAPQHQPQPQFTPTSATKETPIMEFEAKSSRDGAWYDVTYFLSYRSLETREPEALVRFAGFGPEEDEWVNIRRHVRQRSLPCESSECVAVLPGDLALCFQEGKEQALYFDAHVLDAQRRRHDVRGCRCRFLVRYDHDEAEEIVPLRKICRRPDTDYRMQQLSAMPTNVNAQPGLKVDATGETTQSQPKPEGRVDFGAVTLANVSIPSPELKSETLLHS

SEQ ID NO: 414 - DNA, 1017 bp, Triphysaria sp.
atgggccgaccgccgagcaatggaggtccctccttccgctttaacgccgccgaggttggggaaatggaggcgattttgctagcacacgattgcgtagtgccagcacgtgaaactattgaggctctttcccagaggtttagtgccacaggtgaacgagccggaaaagttgaagcttcatttaaacaagtcttaaactggttccaaaacaggcgatatgctatccgtgcaaaagcagctagggtgcccgttcctggtgagacgaacatctatcatatgcctcacaatggtcaagctgcggttctcaatgtgcctcaggctcctcagcatcagcctcaacctcagttcactcccacaaccatgaaaagtgtgccgttagttcctcatcctcatcctgttccatcaggtgcaactaaagaaactcctataatggaatttgaagccaagtcttctagagatggggcatggtatgatgttacttatttcctgtcgtacagatcattagagactagagagccggaagctctagttcgttttgccggttttggaccagaagaggatgaatgggtcaatatccgcaggcatgtgagacaacgatcactaccgtgtgaatcttcagaatgtgtagccgttctacctggggatttggccctatgccttcaggaaggaaaagagcaagccctatattttgacgcacacgttcttgatgcacaaaggcggaggcatgacgtaagaggctgtcgttgtaggtttctggtgcgatatgatcacgatgaagctgaggaaatagttcccctcaggaagatatgccgtcggcccgatactgattataggatgcagcaactaagcgccatgcccactaacgtgaacgcacaacctgggttgaaagttgatgctacaggcgaaacaacacaaagccagcccaggcccgagggccgtgttgattttggagctgtcactctagccaatgtttccataccatcacctgaacttaaatccgaaacgttgttgcattcctga

SEQ ID NO: 415 - protein, 338 aa, Triphysaria sp.
MGRPPSNGGPSFRFNAAEVGEMEAILLAHDCVVPARETIEALSQRFSATGERAGKVEASFKQVLNWFQNRRYAIRAKAARVPVPGETNIYHMPHNGQAAVLNVPQAPQHQPQPQFTPTTMKSVPLVPHPHPVPSGATKETPIMEFEAKSSRDGAWYDVTYFLSYRSLETREPEALVRFAGFGPEEDEWVNIRRHVRQRSLPCESSECVAVLPGDLALCLQEGKEQALYFDAHVLDAQRRRHDVRGCRCRFLVRYDHDEAEEIVPLRKICRRPDTDYRMQQLSAMPTNVNAQPGLKVDATGETTQSQPRPEGRVDFGAVTLANVSIPSPELKSETLLHS

SEQ ID NO: 416 - DNA, 933 bp, Triticum aestivum
atgacggggcaggcgccaagtctcctgttccggttcaccgacacggaggtcgccaagatggaggaggtcctccgtgacctcaacgccatgcccaagcatcatgtcatccagggcctcaccgacaatttgaacgcctccccggaccgctccggcgacggcaaggtccctgtccagtacaatcaggtgaggaattggttccagaaccggatgtccgtgcagtccaggaagatgatggtccccccagtggccgaggaacaccacccagtggccggatcttactcagggaatagttcttcggatggtggccatgtccagtttgaggcaaagtcagcaagaaatggcgcatggtacgatgttgctgcctttctgtcccacaggttcactggaacaaaggacccggaagtactagttcgatttacttggcttggacccgaggaggatgaatgggttgatgtttgtaaatgtgtgagagtgcgttctcttcaatgtgttgctgtgctgcctggggatctcattatgtgttttaaggaagataaagagcaggcccgctattttgatgcacatgttcttcaagttcaaaggcgcaggcatgacgtaagggggtgccgctgcaggtttcttgtttgttatgatcatcatcactctgaggagtttgttccattgagcaaggtatgccgtcgatcagtgcaccagaaagcccaaaagccgcacgagatgatggatgtcaacactgacaaggtgaccgggggcggggttcccattccaccagatcaaggaggtccatctgacaagccggttgctcccttacttgactcgcctactagcactggcagcaattcagtggcagatgttgaggcggggggcatggaggctaccccaaatggtgaaggtgcagatgaagcacatggcgacaagattgatgtgggagcgtag

SEQ ID NO: 417 - protein, 310 aa, Triticum aestivum
MTGQAPSLLFRFTDTEVAKMEEVLRDLNAMPKHHVIQGLTDNLNASPDRSGDGKVPVQYNQVRNWFQNRMSVQSRKMMVPPVAEEHHPVAGSYSGNSSSDGGHVQFEAKSARNGAWYDVAAFLSHRFTGTKDPEVLVRFTWLGPEEDEWVDVCKCVRVRSLQCVAVLPGDLIMCFKEDKEQARYFDAHVLQVQRRRHDVRGCRCRFLVCYDHHHSEEFVPLSKVCRRSVHQKAQKPHEMMDVNTDKVTGGGVPIPPDQGGPSDKPVAPLLDSPTSTGSNSVADVEAGGMEATPNGEGADEAHGDKIDVGA

SEQ ID NO: 418 - DNA, 816 bp, Triticum aestivum
atggagcggcgatccaccacccgcttctcgccttccgagattgcgaggatggagaagttggtttcatcagacagaaaagagcaagtcttggttgatagtttctgccagaagcttgtagaagaatttaatcgttctccagctcgagtcggaagcagagctctacaggctacacaggttcgaggatggttccttgataagctccctgcatcaactcctaaacctgcttccttgcctactacttctgaagaaaagcctttagcctcagaaccagatgcgttagtttctgagataaagacttcagcttctgatgaagaaaaagttttagctcttgatacaagtatttcaaacaatgaggatgcactttctgcggatttacccaaagagactacagataaggttcctgaatttgaagacttgcagtttgaggctaagtcatcaaaggattctgcatggtatgacgtcgcccttttcttggcacacaggaagacaagtttgggagaagttgaagtccgggtgaggtttatcggatatggggctgaagaagatgagtgggtgaatgtcaggaaggctgtccgccagcaatccattccgctggagtcctcagaatgccgaagcattgtcaaaggagatcttgtcctgtgtttcaaggagagcaatgatgaagcactgcatttcgatgcacacgttgtggatgtccagcggaaacagcatgatataaggggatgcagatgcctcttccatgttgaatatgatcatgatcaaagccaggagatggtgaacctcaagagaatctccaggcggccaagatacctttga

SEQ ID NO: 419 - protein, 271 aa, Triticum aestivum
MERRSTTRFSPSEIARMEKLVSSDRKEQVLVDSFCQKLVEEFNRSPARVGSRALQATQVRGWFLDKLPASTPKPASLPTTSEEKPLASEPDALVSEIKTSASDEEKVLALDTSISNNEDALSADLPKETTDKVPEFEDLQFEAKSSKDSAWYDVALFLAHRKTSLGEVEVRVRFIGYGAEEDEWVNVRKAVRQQSIPLESSECRSIVKGDLVLCFKESNDEALHFDAHVVDVQRKQHDIRGCRCLFHVEYDHDQSQEMVNLKRISRRPRYL

SEQ ID NO: 420 - DNA, 813 bp, Triticum aestivum
atggagcggcgatccaccacccgcttctcgccatccgagattgcgaggatggagaagttggtttcatcagacagaaaagagcaagtcttggttgatagtttctgccagaagcttgtagaagaatttaatcgttctccagcccgagtaggaagcagagctctacaggctacacaggttcgaggatggttccttgataagctccctgcatcaactcctaaacctgcttccttgcctactacttctgaagaaaagcctttagcctcagaaccagatgcgttagtttctgagataaagacttcagcttctgaagaaaaagctttagctcttgatacaagtatttcaaacaatgaggatgcactttctccagatttacccaaagagactacagataaggttcctgaatttgaagacttgcagtttgaggccaagtcatcaaaggattctgcatggtatgacgtcgcccttttcttggcacacaggaagacaagtttgggagaagttgaagtccgggtgaggtttatcggatatggggctgaagaagatgagtgggtgaatgtcaggaaggctgtccgccagcaatccattccgctggagtcctcagaatgccgaagcattgtcaaaggagatcttgtcctgtgtttcaaggagagcaatgatgaagcactgcatttcgatgcacacgttgtggatgtccagcggaaacagcatgatataaggggatgcagatgcctcttccatgttgaatatgatcatgatcaaagccaggagatggtgaacctcaagagaatctccaggcggccaagatacctttga

SEQ ID NO: 421 - protein, 270 aa, Triticum aestivum
MERRSTTRFSPSEIARMEKLVSSDRKEQVLVDSFCQKLVEEFNRSPARVGSRALQATQVRGWFLDKLPASTPKPASLPTTSEEKPLASEPDALVSEIKTSASEEKALALDTSISNNEDALSPDLPKETTDKVPEFEDLQFEAKSSKDSAWYDVALFLAHRKTSLGEVEVRVRFIGYGAEEDEWVNVRKAVRQQSIPLESSECRSIVKGDLVLCFKESNDEALHFDAHVVDVQRKQHDIRGCRCLFHVEYDHDQSQEMVNLKRISRRPRYL

SEQ ID NO: 422 - DNA, 744 bp, Vitis vinifera
atggatgatgcccctgttcctattgcttgttttacacaatctgagatcttggaaatggagaatttatttgaggaatttggagaagaaacgctaggccaggaattctgccaagatcttgccaccagctttagtgcctcaccaggttgttctgggaatatgcccgtaggatggaaagaggtgcgagattggttccaaactaagcaaaaagagttggttgctagagtcacttcctcacctgttgctcccagaggaatcgatgctcttccagaagcacccatgtcaaacaatgcacctcaaaattctatagttccaagaggggacatggttgcagcagatctttcagagttgacgtatgaggctaaatcatcaaaagatgatgcatggtacgacgttgctgcattcctcacctacagagttcttagctctggtgaacttgaagctcgtgtaagattttctggatttggcaatgaggaggacgagtgggtgaatgtcaaaaagggaatacgaaagcggtcgattcctctagagccttcagagtgttacagggtcagagttggagatttggtgttatgcttccaggaaagatcagatcaagcagtctactgtgatgcccacattatagaaatccaaaggaggttacatgacattaagggctgcaggtgcatcttcgtggttcgctatgatcatgaccatggcgaggaaaaggttaacttgaagagattatgttgcagaccaacactgtag

SEQ ID NO: 423 - protein, 247 aa, Vitis vinifera
MDDAPVPIACFTQSEILEMENLFEEFGEETLGQEFCQDLATSFSASPGCSGNMPVGWKEVRDWFQTKQKELVARVTSSPVAPRGIDALPEAPMSNNAPQNSIVPRGDMVAADLSELTYEAKSSKDDAWYDVAAFLTYRVLSSGELEARVRFSGFGNEEDEWVNVKKGIRKRSIPLEPSECYRVRVGDLVLCFQERSDQAVYCDAHIIEIQRRLHDIKGCRCIFVVRYDHDHGEEKVNLKRLCCRPTL

SEQ ID NO: 424 - DNA, 945 bp, Vitis vinifera
atggatcgccttcgccctagagagagacggctgttttctggcttcacaaaactcgaggtggaaaaaatggagaaggtgctcaaggaatcaggagaacaggcattgaacccagatttctgcaaaagactaacgggtggttttaatcgctcttcaggtcgtgctgggaaacctgctataaaatggattgaggtgcaaagttggtttcaggataggctacaagagtgcacgcacaaagtttcttgtccacctaatgtctccaaggaactgtgtgttttaccagaaacattcccttcaaataagctacatgaaagttctcaaatgcctgaaggagacccagatttatcagaattagaatttgaggcacggtcatccaaagatggggcttggtatgatgttgatacattcctcacccacagatttcttagttcaggtgaacttgaagttcgtgtaagatttgttggatttggggctgaggaggatgaatgggtaaatgtgaaaaaggcggtgcgtgaacgctctctccccctggagcattcagaatgtcacaaagttaaggttggagacgtcgttctctgcttccaggaaaggagggatcaagcaatctactatgatgcccatgttgtagaaattcaaagaaaaatgcatgatataaggggatgcaggtgtctcttcttgattcgatatgaccatgacaacacagaggcaagcattgttgaatccacacaaattttcttctctccttttatatcatcaatcaagttaataattcatccctttgacttttggttcaaatattcttctgttttctttcttttttcctttttctcaggaaagagttcatctgaggagattatgttgcaggccaacatgttaaatttgtcagaaaatggcatcgacaatataggtatggttggaaatcttttagggtttttggtggggggatag

SEQ ID NO: 425 - protein, 314 aa, Vitis vinifera
MDRLRPRERRLFSGFTKLEVEKMEKVLKESGEQALNPDFCKRLTGGFNRSSGRAGKPAIKWIEVQSWFQDRLQECTHKVSCPPNVSKELCVLPETFPSNKLHESSQMPEGDPDLSELEFEARSSKDGAWYDVDTFLTHRFLSSGELEVRVRFVGFGAEEDEWVNVKKAVRERSLPLEHSECHKVKVGDVVLCFQERRDQAIYYDAHVVEIQRKMHDIRGCRCLFLIRYDHDNTEASIVESTQIFFSPFISSIKLIIHPFDFWFKYSSVFFLFSFFSGKSSSEEIMLQANMLNLSENGIDNIGMVGNLLGFLVGG

SEQ ID NO: 426 - DNA, 1143 bp, Zea mays
atgggtcgtccgccgagcgccggtgctccggcgttccgcttcctcccgtccgaggtggcggagatggaggcgcgcctgctgcagctcaacaacggcatccccacccgcgccgtgctgcagaccctcgcggataagttctccgcttcgcccgagcgcgctggcaaggtggccatccagcccaagcaggtgtggaactggtttcagaacagacggtactcacaccgggccaaaactcccagggccgcgtcgtcaccgccggctaagatgacgccctcgggagctgatcaccaccagcatgccgctaacgcctccgccttcagggctgctcagctctcttctgttgctgctgcgcaccacggttcctcctctacagggaagaatcctgtggaaagtgtctcagttgagtttgaggccaagtcagctcgtgatggtgcatggtatgatgttgctgcctttctttcacataggttgtttgaatccggtgacccggaggtgcgggttcgtttttctggatttggggcagaggaggatgaatggatcaatgttcgcaaatgtgtgcgacaacgttctcttccatgcgaggccacagaatgtgttgctgtgcttcctggggacctgattctttgttttcaggaaggtaaagatcaggctctctattatgatgctcatgtccttgatgctcaaaggagaaggcatgacgttagaggttgccgttgtagatttcttgttcgctacgaccatgattcttctgaggaaattgttccactgaggaaggtgtgccgccgaccggaaactgactacaggcttcagattctgcatgctgctagagcggcagccactaatgcagatgttcacactccacccaaagaggttaaggtggagttggcgtccactgataagagcccagccgagcagaaaccccataagcagcacaagatgatggacgtgaacactgatgaggtgaccatggtctccaccttggagcaagatgagacaccaggcaagactgtagcccccgtaccgtcagcaactgcagaaacccgcaattcaagttcggacacagtgatgaaaggtgctgaggcttcctcggtcgttgaagatgacgatgaagtgcaggcagttgacaagatgaaagaggggtag

SEQ ID NO: 427 - protein, 380 aa, Zea mays
MGRPPSAGAPAFRFLPSEVAEMEARLLQLNNGIPTRAVLQTLADKFSASPERAGKVAIQPKQVWNWFQNRRYSHRAKTPRAASSPPAKMTPSGADHHQHAANASAFRAAQLSSVAAAHHGSSSTGKNPVESVSVEFEAKSARDGAWYDVAAFLSHRLFESGDPEVRVRFSGFGAEEDEWINVRKCVRQRSLPCEATECVAVLPGDLILCFQEGKDQALYYDAHVLDAQRRRHDVRGCRCRFLVRYDHDSSEEIVPLRKVCRRPETDYRLQILHAARAAATNADVHTPPKEVKVELASTDKSPAEQKPHKQHKMMDVNTDEVTMVSTLEQDETPGKTVAPVPSATAETRNSSSDTVMKGAEASSVVEDDDEVQAVDKMKEG

SEQ ID NO: 428 - DNA, 1149 bp, Zea mays
atgggtcgtccgccgagcaccactggtgctccggccttccgcttcctcccttccgaggtggcggagatggaggcgcgcttgctgcagctcaacaacggcatccccacccgcgccatgctccagactctcgccgataagttctccgcctcgcccgagcgcgccggcaaggtggccatccagcccaagcaggtgtggaactggtttcagaacaggcgttactcgcatcgggccaagaccaccagggtcgtgccgtctccaccggctaagatgaccccctcgggggccgatcaccaccagcacgccgctaacgcctccgccttcagggccgctcagccctcttctgtcgctgttgctcaccatggctcctcctcgacagggaagaaccctatggaaggtgtctcagttgagtttgaggccaagtcagctcgtgatggtgcatggtatgatgttgctgcctttctgtcacataggttgtttgaatccggtgacccggaagtgcgggttcgtttttctggatttggggcagaggaggatgaatggatcaatgttcgcaaatgtgtgcgacaacgttctcttccatgcgaggccacagaatgcgttgctgtgcttcctggggacctcattctttgttttcaggaagataaagagcaggctctctattttgatgctcgtgtccttgatgctcaaaggagaaggcatgatgttagaggttgccgttgtagatttcttgttcgctatgatcatgactcttctgaggaaattgttccactgaggaaggtgtgccgccgaccagaaactgactacaggcttcagattctgcatgctgctagagcggcagccgccagtgcagatattcacactccacccagagaggctaaagtggagttggcatccaatgctaagagcccatatgagcaaaaaccccagaagcagtacaagatgatggacgtgaacactgatgaggaggtgaccatggtctccaccttggaacaggatgagacacaaggcaagactgtagcccccgtaccgtcagcaactgcagaaacccgcaattcaagttcagacgcggtgatgaaggatgcggaggcttcgtccgtggctcaagacgatgatgaagtgcaggtggttgacaagatgaaagaggggtag

SEQ ID NO: 429 - protein, 382 aa, Zea mays
MGRPPSTTGAPAFRFLPSEVAEMEARLLQLNNGIPTRAMLQTLADKFSASPERAGKVAIQPKQVWNWFQNRRYSHRAKTTRVVPSPPAKMTPSGADHHQHAANASAFRAAQPSSVAVAHHGSSSTGKNPMEGVSVEFEAKSARDGAWYDVAAFLSHRLFESGDPEVRVRFSGFGAEEDEWINVRKCVRQRSLPCEATECVAVLPGDLILCFQEDKEQALYFDARVLDAQRRRHDVRGCRCRFLVRYDHDSSEEIVPLRKVCRRPETDYRLQILHAARAAAASADIHTPPREAKVELASNAKSPYEQKPQKQYKMMDVNTDEEVTMVSTLEQDETQGKTVAPVPSATAETRNSSSDAVMKDAEASSVAQDDDEVQVVDKMKEG

SEQ ID NO: 430 - DNA, 810 bp, Zea mays
atggagcggcggtcctccgtccgctttgtgccatccgagattgcaaggatggagaaattggctgcagatagaaaagaccaagtctttgataacaagttctgccagaagcttgcagaagaatttaatcgttctgttggccgtgctggaagtaaagcgttacaagctacacaggttcaaggatggtttcttaataagtttccagcatcagccactaaacctacttgtgtgcccactgcttcccaagaaaagacttcagcctcagaaataaatgtatcagtttctgaaaaaagatctgcagcttccgaagagaaacttttccctcttgatacaggtgtttcaaataatgaggatgaggtttctcctgtttttccattagaaactaaagatatgattcctgaacttgaagacctggagtttgaggccaagtctacaaaggattttgcctggtatgacattgccctattcttggcacacaggaggaacagggcgggtgaagtagaagtccgggtgagattcgagggttttggggcggatgaggatgagtgggtgaatgtcaagaagttcatccgccagcgttccattcctctggagtcctcacagtgcaaaagcgttgttgaaggtgaccttgttctctgcttcagggagggaaacgaggaggcattgcatttcgatgcacatgttcttgaggttcagcggaagcagcatgatattagggggtgcagatgtgtattccttgttgaatacgatcatgaccaaagccaggagagggttagcctgagaagattgtcccggcggccaaagtacttttga

SEQ ID NO: 431 - protein, 269 aa, Zea mays
MERRSSVRFVPSEIARMEKLAADRKDQVFDNKFCQKLAEEFNRSVGRAGSKALQATQVQGWFLNKFPASATKPTCVPTASQEKTSASEINVSVSEKRSAASEEKLFPLDTGVSNNEDEVSPVFPLETKDMIPELEDLEFEAKSTKDFAWYDIALFLAHRRNRAGEVEVRVRFEGFGADEDEWVNVKKFIRQRSIPLESSQCKSVVEGDLVLCFREGNEEALHFDAHVLEVQRKQHDIRGCRCVFLVEYDHDQSQERVSLRRLSRRPKYF

SEQ ID NO: 432 - DNA, 942 bp, Zea mays
atatactacaaactaaattagaaaactctgtacgacaacatcaagtcctccaaacacaaaaagtgcgaaaaaaagctacccctctttcatcttgtcaaccacctgcacttcatcatcgtcttgagccacggacgaagcctccgcatccttcatcaccgcgtctgaacttgaattgcgggtttctgcagttgctgacggtacgggggctacagtcttgccttgtgtctcatcctgttccaagggggagaccatgggcacctcctcatcagggttcacgtccatcatcttggactgcttctgggggttttgctcatatgggctcttagcattggatgccaactccactttagcctctctggggggagtgggaatatctgcacgtggcggctgcgcgctctagcagcatgcagaatctgaagcctgtagtcagtttctggtcggcggcacaccttcctcagtggaacaatttcctcagaagagtcatgatcatagcgaacaagaaatctacaacggcaacctctaacatcatgccttctcctttgagcatcaaggacatgagcatcataatagagagcctgatctttaccttcctgaaaacaaagaatcaggtccccaggaagcacagcaacacattctgtggcctcgcatggaagagaacgttgtcgcacacatttgcgaacattgatccattcatcctcctctgccccaaatccagaaaaacgaacccgcacctccgggtcaccggattcaaacaacctatgtgacagaaaggcagcaacatcataccatgcaccatcacgagctgacttggcctcaaactcaactgagacactttccacaggattcttccctgtagaggaggagccgtggtgcgcagcagcaacagaagagagctgagcagccctgaaggcggaggcgttagcggcatgctgctggtgatca

SEQ ID NO: 433 - protein, 313 aa, Zea mays
MGRPPSAGAPAFRFLPSEVAEMEARLLQLNNGIPTRAVLQTLADKFSASPERAGKVAIQPKQVWNWFQNRRYSHRAKTPRAASSPPAKMTPSGADHQQHAANASAFRAAQLSSVAAAHHGSSSTGKNPVESVSVEFEAKSARDGAWYDVAAFLSHRLFESGDPEVRVRFSGFGAEEDEWINVRKCVRQRSLPCEATECVAVLPGDLILCFQEGKDQALYYDAHVLDAQRRRHDVRGCRCRFLVRYDHDSSEEIVPLRKVCRRPETDYRLQILHAARARSRHVQIFPLPPERLKWSWHPMLRAHMSKTPRSSPR

SEQ ID NO: 434 - DNA, 1170 bp, Zea mays
atgggtcgtccgccgagcgccggtgctccggcgttccgcttcctcccgtccgaggtggcggagatggaggcgcgcctgctgcagctcaacaacggcatccccacccgcgccgtgctgcagaccctcgcggataaattctccgcttcgcccgagcgcgctggcaaggtggccatccagcccaagcaggtgtggaactggtttcagaacagacggtactcacaccgggccaaaactcccagggccacgtcgtcaccgccggctaagatgacgccctcgggagctgatcaccagcagcatgccgctaacgcctccgccttcagggctgctcagctctcttctgtcgctgctgcgcaccacggttcctcctctacagggaagaatcctgtggaaagtgtctcagttgagtttgaggccaagtcagctcgtgatggtgcatggtatgatgttgctgcctttctttcacataggttgtttgaatccggtgacccggaggtgcgggttcgtttttctggatttggggcagaggaggatgaatggataaatgttcgcaaatgtgtgcgacaacgttctcttccatgcgaggccacagaatgtgttgctgtgcttcctggggacctgattctttgttttcaggaaggtaaagatcaggctctctattatgatgctcatgtccttgatgctcaaaggagaaggcatgatgttagaggttgccgttgtagatttcttgttcgctacgaccatgattcttctgaggaaattgttccactgaggaaggtgtgccgccgaccggaaactgactacaggcttcagattctgcatgcggctagagcggcagccacgaatgcagatgttcacactccacccaaagaggttaaggtggagttggcgtccactgataaaagcccagccgagcagaaaccccagaagcagcacaagatgatggacgtgaacactgatgaggtgaccatggtctccaccttggagcaagatgagacaccaggcaagactgtagcccccgtaccgtcagccactgcagaaacccgcaattcaagttcggacacagtgatgaaaggtgctgaggcttcctcggtcgttgaagatgacgatgaagtgcaggcagttgacaagatgaaagaggggagaagttttattcccttatcttttggttag

SEQ ID NO: 435 - protein, 389 aa, Zea mays
MGRPPSAGAPAFRFLPSEVAEMEARLLQLNNGIPTRAVLQTLADKFSASPERAGKVAIQPKQVWNWFQNRRYSHRAKTPRATSSPPAKMTPSGADHQQHAANASAFRAAQLSSVAAAHHGSSSTGKNPVESVSVEFEAKSARDGAWYDVAAFLSHRLFESGDPEVRVRFSGFGAEEDEWINVRKCVRQRSLPCEATECVAVLPGDLILCFQEGKDQALYYDAHVLDAQRRRHDVRGCRCRFLVRYDHDSSEEIVPLRKVCRRPETDYRLQILHAARAAATNADVHTPPKEVKVELASTDKSPAEQKPQKQHKMMDVNTDEVTMVSTLEQDETPGKTVAPVPSATAETRNSSSDTVMKGAEASSVVEDDDEVQAVDKMKEGRSFIPLSFG

SEQ ID NO: 436 - DNA, 858 bp, Zea mays
atggatcggcggcaatcaagcagcagcgggatgatggagggaccgttccgattcttgccggccgaagtgaaagagatggaggagcgcctgttcccggtcaccaatcgcaggctggatcacatcctcatggatgagctcgctctgaaatttagctgcttccggcgccgtgctggcatggttcccgtcaagccaaagcaggtgctcaactggttttataacaaccgtaacaagacttctgccaaggtagcagccagggaagcacatgctccatgggagttttgggccaaccatcagcaagctagagctagaggaggctcatccatcagcaagctgaagccaaagaaggcgactacgcacgcaggatcttcctcagggaataattatatcgatgtatatcacaccaagtttgaagctaagtcagctagagatggctcttggtaccttgtcgaagaattcttgactgaaaagttttgtgaatcaggcgatttgcaagtattggttcgctttcctggatttggagttgaggaagctgaatggatcgatgttcgtacatgtactttgcggcaacgctcagtgccatacaaggccacagaatgtgcagatgttcatatttgggaccctgttctttgttacaaggtaagtgaacagagtggtctctattttgatgctgaagtgcatgctattgaaaggaaaacacataattcaggagaagaatgtgattgcaaaatccttgttctttatgtgcatgataattctgaggacatcgtttccttgaagaagttgcgccgtcgatacgtagaatatgactacaaacctcaaacttcgtatgagctgccaaaaggaacgaaaatagcttaa

SEQ ID NO: 437 - protein, 285 aa, Zea mays
MDRRQSSSSGMMEGPFRFLPAEVKEMEERLFPVTNRRLDHILMDELALKFSCFRRRAGMVPVKPKQVLNWFYNNRNKTSAKVAAREAHAPWEFWANHQQARARGGSSISKLKPKKATTHAGSSSGNNYIDVYHTKFEAKSARDGSWYLVEEFLTEKFCESGDLQVLVRFPGFGVEEAEWIDVRTCTLRQRSVPYKATECADVHIWDPVLCYKVSEQSGLYFDAEVHAIERKTHNSGEECDCKILVLYVHDNSEDIVSLKKLRRRYVEYDYKPQTSYELPKGTKIA

SEQ ID NO: 438 - protein, 72 aa, Artificial sequence
  Homeodomain
NGGPSFRFMQYEVTEMDAILQEHHNMMPAREVLVSLAEKFSESSERKGKIQVQMKQVWNWFQNRRYAIRAKS

SEQ ID NO: 439 - protein, 50 aa, Artificial sequence
  SAWADEE domain - motif 4
  VARIANT (1)..(1): / replace = "Val"
  VARIANT (5)..(5): / replace = "Val"
  VARIANT (13)..(13): / replace = "Asp"
  VARIANT (18)..(18): / replace = "Tyr"
  VARIANT (24)..(24): / replace = "Glu"
  VARIANT (25)..(25): / replace = "Ala"
  VARIANT (28)..(28): / replace = "Lys"
  VARIANT (29)..(29): / replace = "Leu"
  VARIANT (32)..(32): / replace = "Ile"
  VARIANT (38)..(38): / replace = "Ile"
  VARIANT (40)..(40): / replace = "Val"
PGDLILCFQEGKEQALYFDAHVLDIQRRRHDVRGCRCRFLVRYDHDQSEE

SEQ ID NO: 440 - protein, 21 aa, Artificial sequence
  SAWADEE domain - motif 5
  VARIANT (3)..(3): / replace = "Leu"
  VARIANT (7)..(7): / replace = "Ser"
  VARIANT (11)..(11): / replace = "Pro"
  VARIANT (17)..(17): / replace = "Ile"
  VARIANT (20)..(20): / replace = "Lys"
  VARIANT (21)..(21): / replace = "Arg"
EVRVRFAGFGAEEDEWVNVRK

SEQ ID NO: 441 - protein, 15 aa, Artificial sequence
  SAWADEE domain - motif 6
  VARIANT (1)..(1): / replace = "Lys"
  VARIANT (10)..(10): / replace = "Ser" / replace = "Thr"
  VARIANT (13)..(13): / replace = "Thr"
  VARIANT (14)..(14): / replace = "Tyr"
RDGAWYDVAAFLSHR

SEQ ID NO: 442 - protein, 132 aa, Artificial sequence
  SAWADEE domain
FEAKSGRDGAWYDVGTFQSHRYLDKGDPEVLVRFAGFGPDEDEWLNVCKHVRQRSLPCEASECVAVLPGDLILCFQEGKDQALYFDAHVLDAQRRRHDVRGCRCRFLVRYDHDQSEEIVPLRKICRRPETDY

SEQ ID NO: 443 - DNA, 2194 bp, Oryza sativa; identical to SEQ ID NO: 321

SEQ ID NO: 444 - DNA, 3990 bp, Artificial sequence
  expression cassette
aatccgaaaagtttctgcaccgttttcaccccctaactaacaatatagggaacgtgtgctaaatataaaatgagaccttatatatgtagcgctgataactagaactatgcaagaaaaactcatccacctactttagtggcaatcgggctaaataaaaaagagtcgctacactagtttcgttttccttagtaattaagtgggaaaatgaaatcattattgcttagaatatacgttcacatctctgtcatgaagttaaattattcgaggtagccataattgtcatcaaactcttcttgaataaaaaaatctttctagctgaactcaatgggtaaagagagagattttttttaaaaaaatagaatgaagatattctgaacgtattggcaaagatttaaacatataattatataattttatagtttgtgcattcgtcatatcgcacatcattaaggacatgtcttactccatcccaatttttatttagtaattaaagacaattgacttatttttattatttatcttttttcgattagatgcaaggtacttacgcacacactttgtgctcatgtgcatgtgtgagtgcacctcctcaatacacgttcaactagcaacacatctctaatatcactcgcctatttaatacatttaggtagcaatatctgaattcaagcactccaccatcaccagaccacttttaataatatctaaaatacaaaaaataattttacagaatagcatgaaaagtatgaaacgaactatttaggtttttcacatacaaaaaaaaaaagaattttgctcgtgcgcgagcgccaatctcccatattgggcacacaggcaacaacagagtggctgcccacagaacaacccacaaaaaacgatgatctaacggaggacagcaagtccgcaacaaccttttaacagcaggctttgcggccaggagagaggaggagaggcaaagaaaaccaagcatcctcctcctcccatctataaattcctccccccttttcccctctctatataggaggcatccaagccaagaagagggagagcaccaaggacacgcgactagcagaagccgagcgaccgccttcttcgatccatatcttccggtcgagttcttggtcgatctcttccctcctccacctcctcctcacagggtatgtgcccttcggttgttcttggatttattgttctaggttgtgtagtacgggcgttgatgttaggaaaggggatctgtatctgtgatgattcctgttcttggatttgggatagaggggttcttgatgttgcatgttatcggttcggtttgattagtagtatggttttcaatcgtctggagagctctatggaaatgaaatggtttagggtacggaatcttgcgattttgtgagtaccttttgtttgaggtaaaatcagagcaccggtgattttgcttggtgtaataaaagtacggttgtttggtcctcgattctggtagtgatgcttctcgatttgacgaagctatcctttgtttattccctattgaacaaaaataatccaactttgaagacggtcccgttgatgagattgaatgattgattcttaagcctgtccaaaatttcgcagctggcttgtttagatacagtagtccccatcacgaaattcatggaaacagttataatcctcaggaacaggggattccctgttcttccgatttgctttagtcccagaattttttttcccaaatatcttaaaaagtcactttctggttcagttcaatgaattgattgctacaaataatgcttttatagcgttatcctagctgtagttcagttaataggtaatacccctatagtttagtcaggagaagaacttatccgatttctgatctccatttttaattatatgaaatgaactgtagcataagcagtattcatttggattattttttttattagctctcaccccttcattattctgagctgaaagtctggcatgaactgtcctcaattttgttttcaaattcacatcgattatctatgcattatcctcttgtatctacctgtagaagtttctttttggttattccttgactgcttgattacagaaagaaatttatgaagctgtaatcgggatagttatactgcttgttcttatgattcatttcctttgtgcagttcttggtgtagcttgccactttcaccagcaaagttcatttaaatcaactagggatatcacaagtttgtacaaaaaagcaggcttaaacaatgggtcgtcctcccagtaatggcggtccttcctttcgcttcatgcagtatgaggtcacggagatggacgctattttgcaagaacaccataacatgatgccagctcgtgaggttcttgtatctcttgcagagaagttcagtgagtcttcagagcgaaaagggaagattcaagtgcaaatgaaacaagtttggaattggttccaaaatagacggtatgcaataagggcaaaatcaaataaggccccgatgaagttaaatataacacctatgcctcgcgatgattcagctgctgcgaggagtgtgcctcaacaagcagctgctcctatacctgatgctgtgccagccactacatctgcttcttcagctgctggtgccagaagggcaacttcagaaaactcttatatggaatttgaagccaaatctggtagagatggtgcatggtatgatgtaggaaccttccaatcccatagatacttggacaagggggatccggaagtattggttcggtttgctggttttggacctgatgaagatgagtggcttaatgtttgcaagcatgtcaggcagcgttctctcccttgcgaagcatcggaatgtgttgcagttcttcctggagacctcatactctgttttcaggaaggcaaagatcaggctctgtattttgatgctcatgttcttgatgcacaaagacgaagacatgatgtaagaggttgccgttgtaggtttttggtgcgttatgatcatgaccagtctgaggaaattgtgccactaaggaagatttgtcggaggcctgaaactgattataggctgctacaacttcatgctgcaaatgactcagcagctactgaccagcagaaaactagtgtagatccctccatagcaagtaccctgagggttgctgcttctgccacagaaacaatgctgcagcagcaacataacacaggtgtagcagctccggtttcccaagccaatgtttctcaacctgccaaaacaataattgcggagccaaaagaggctgcaaccctcagtgctgtcgattctggaaatcctagtttcatctccactgctgtgtttcccagcgttacggctaccgctgctgtgttggcgagtggaatggctacgagtaacggccctggtggctctggagagaacatgcagggaattaaattgtagtttgatgtaccttgatagctgctctgtttcaacccagctttcttgtacaaagtggtgatatcacaagcccgggcggtcttctagggataacagggtaattatatccctctagatcacaagcccgggcggtcttctacgatgattgagtaataatgtgtcacgcatcaccatgggtggcagtgtcagtgtgagcaatgacctgaatgaacaattgaaatgaaaagaaaaaaagtactccatctgttccaaattaaaattcattttaaccttttaataggtttatacaataattgatatatgttttctgtatatgtctaatttgttatcatccgggcggtcttctagggataacagggtaattatatccctctagacaacacacaacaaataagagaaaaaacaaataatattaatttgagaatgaacaaaaggaccatatcattcattaactcttctccatccatttccatttcacagttcgatagcgaaaaccgaataaaaaacacagtaaattacaagcacaacaaatggtacaagaaaaacagttttcccaatgccataatactcgaac

SEQ ID NO: 445 - DNA, 53 bp, Artificial sequence
  primer: prm14262
ggggacaagtttgtacaaaaaagcaggcttaaacaatgggtcgtcctcccagt

SEQ ID NO: 446 - DNA, 51 bp, Artificial sequence
  primer: prm14263
ggggaccactttgtacaagaaagctgggttgaaacagagcagctatcaagg

SEQ ID NO: 447 - DNA, 987 bp, Solanum lycopersicum
atgacagacagcaaggtagagactctatcaaggttagctcaatggaggatcgacaatttcacagcatctacttacaaaagatctgacccttttaaaattggtatatggaactggcatctgtcaattgagaagaatcggtatttgtatattcgattgtttcctgaaccttctcggctttcgaaagagcagcttcctcctccttttgctcgctttatgcttcgtgttactacaactggaaccaatcggagacctcatatatctcctgtatatgagaggctgcttcgaacaagtgatgactttgtgtggcctattgattcttgtttacaaggtcgatttgtcattgatgttgagttccttgacctgaagatctacaccccaaatggtggagaaggaaaatctatatggcccaatgacatgattttgcaatctttagctacccaaagtactctccgatgcctctctcgcatgcttgatgagtccatccatactgatgttaccattaatacggctgatggatcagtgcaagctcacagagcgatactgtctgctacttctcctgtattccacagcatgttccttcacgatctcagggagaaagagtcctctataatcgacatagaagacatgtcaacagaatcatgcacagcgcttcttagttacttgtatggaaccataaaacaagaggatctctggaagcaccgattggcattactgggtgcggcaaacaagtatgatattgtagatttgaagaatgcttgtgaggaaagtctcctagaagacatcaactcgggtaatgtcctcgaaagactgcaagaggcctggctttaccagctaaataaattgaaaaaaggttgcttgatgtatttgttcgattttggcaagatttatgatgttagggaggaaattaacaacttcttcagacaggcagatagagatctgatgctagagatgtttcaagaagtgctcacagtttggaagcctgcctaa

SEQ ID NO: 448 - protein, 328 aa, Solanum lycopersicum
MTDSKVETLSRLAQWRIDNFTASTYKRSDPFKIGIWNWHLSIEKNRYLYIRLFPEPSRLSKEQLPPPFARFMLRVTTTGTNRRPHISPVYERLLRTSDDFVWPIDSCLQGRFVIDVEFLDLKIYTPNGGEGKSIWPNDMILQSLATQSTLRCLSRMLDESIHTDVTINTADGSVQAHRAILSATSPVFHSMFLHDLREKESSIIDIEDMSTESCTALLSYLYGTIKQEDLWKHRLALLGAANKYDIVDLKNACEESLLEDINSGNVLERLQEAWLYQLNKLKKGCLMYLFDFGKIYDVREEINNFFRQADRDLMLEMFQEVLTVWKPA

SEQ ID NO: 449 - DNA, 909 bp, Gossypium hirsutum
atgggtgattcaaaggtcgaaaccatttccagattagctcaatggaggatcgacaactttagtccttgttcttacaaaaaatccgaccccttcaaggtcggtctttggaactggcacttgtctatagagaagaatcgatatatgtatattcgattatttcctgagccatctcgtgtgtctaaggagcagcctccttatgctaaattcatactcaggatctctaatgttggtgctaatcgtagactttatatctccccagttcatgatagaccgctgcgaacgtgtgatgacttttattggcctgttgattcttcattccatggacgcttcattattgatgttgagttcctggaccttaggatctgccccataaatggtggtgaaaccgtttcaatatggcctatggatggagcaatccagtctatgtcaactcaaacaaccctatgctgccttgctcgcatgcttgatgaaggtcttcatgcggatgttactatcaagactgctgaaggtactctaagagcacacaaagcagttctatctgcaagttctcctgttttcgagagtatgttccatcacaaccttaaggaaaaggagtcatccacaatccatatagatgacatgtcactggagtcttgcagggcccttctcaattacttgtatggaacaataaaccaagaggacttttggaagcatcgactgccattactgggagctgcaaataaatacgacattgtggatctcaaagatgcttgtgaggaaagccttctagaaaacatccactctcagaatgtctttgagaggctgcaggaggtttggctttaccaattgacaaacttgaaaaaggggggatgaacatacttgtttgatttcggaaaaaaatttgaagttaaagaaaaaatcaaaaacttt

SEQ ID NO: 450 - protein, 302 aa, Gossypium hirsutum
MGDSKVETISRLAQWRIDNFSPCSYKKSDPFKVGLWNWHLSIEKNRYMYIRLFPEPSRVSKEQPPYAKFILRISNVGANRRLYISPVHDRPLRTCDDFYWPVDSSFHGRFIIDVEFLDLRICPINGGETVSIWPMDGAIQSMSTQTTLCCLARMLDEGLHADVTIKTAEGTLRAHKAVLSASSPVFESMFHHNLKEKESSTIHIDDMSLESCRALLNYLYGTINQEDFWKHRLPLLGAANKYDIVDLKDACEESLLENIHSQNVFERLQEVWLYQLTNLKKGGTYLFDFGKKFEVKEKIKNF

SEQ ID NO: 451 - DNA, 951 bp, Populus trichocarpa
atggcagattcaaaggtagataccatctcccgactagcccagtggaggatcgagaactttggctctttctcttacaaaaaatccgatcctttcaaggtcggaatctggaactggcacttgtctatagagaagaatcggtacttgtacattcgtttatttccagagccgtctcgagcttccaaagaacagcctcctatcgctagatttgttcttcgtgtctcaaatgctgttcatgagagatcgctccggacaagtgaggactttgtctggcctgttgattcttcgtttcatggtcgcctcatcattgatgttgagtttctagacctcaaaatctgccctctgaatggtggggaagcgagttctatatggccaggtgatggaatgatgccgtctgtttcaactcaaggcacacttcgctgtctctctcgcatgctggatgaggccatccatgctgacgttaccattcatactgctgatggcaccctgagtgcacacaaggcaattctttctgcaagttcacctgttttcgagagcatgttcgaccacggcctcaaggaaaaggagtcctccacaatcgacatagaagatatgacactggaatcttgcatgactctcttgagttacttgtatggaaccatcaagcaagaggatttttggaagcaccgtgtgtcactgctgggggcggcgaacaaatatgacattgcagccctcaaggatgcttgcgaggaaagcctcctggaagacatcaataccatgaatgtccttgagaggatgcaagaggcttggctttaccagttgaacaagctgaagaaaggatgcttggcttacttgtttgactttggaaaaatatatgatgttagagatgaaatcggtaagtttttcaggcatgccgacaaggaattgatggtagaaatgtttgaagaggtgcttacggtttggaaacctgtataa

SEQ ID NO: 452 - protein, 316 aa, Populus trichocarpa
MADSKVDTISRLAQWRIENFGSFSYKKSDPFKVGIWNWHLSIEKNRYLYIRLFPEPSRASKEQPPIARFVLRVSNAVHERSLRTSEDFVWPVDSSFHGRLIIDVEFLDLKICPLNGGEASSIWPGDGMMPSVSTQGTLRCLSRMLDEAIHADVTIHTADGTLSAHKAILSASSPVFESMFDHGLKEKESSTIDIEDMTLESCMTLLSYLYGTIKQEDFWKHRVSLLGAANKYDIAALKDACEESLLEDINTMNVLERMQEAWLYQLNKLKKGCLAYLFDFGKIYDVRDEIGKFFRHADKELMVEMFEEVLTVWKPV

SEQ ID NO: 453 - DNA, 975 bp, Glycine max
atgtccgattcgaaggtcgaaaccatcgccagattagcccaatggaaaatcgacaacttcggaccctgctccttcaagagatcagatcctttcaagctcggaatttggaactggttcatgtccatagagaggaacaggtacctctacatacacatctttccagagccttctcggctttctaaggaacagccacccgtggcgcgcttcatcctgcgagtctccaatagctctggccctacccgcaaagtttacatttcccctgttcatgaaagggttcttcggacaagtgaggactttgtctggcctgttgatactgcattccttggtcgcttcgttattgatattgagtttcttgacttgaggacctgccctgtgaatggtgaaaccagatctgtttggccatctgatggaaaactgcaaactgttgcagctcaaagcactcttcgatgcctgtctcacatgcttgatgaggctatacatgctgacctcaccattatcaccgcagatggtactctgagggctcataaggcagttttatctgctagttctactgtgttgcatagcttgtatcttgacaatggtgatgaaaaagagacatctactatcaacatggaagatatgtctcaagagtcctgcatggcccttctgagttacttgtacggcactataaaacaagaagatttctggaaacacaggcttgcattgcttggagcagccgataaatacgagattggagatcttaaagatgcctgtgaggaaagcctactggaagatcttaactcgggaaatgttctggataggttaaatgatgcttggctttaccagttgcaagcgttaaagaaaggatgtttctcatacttattttattatggtaagatttatgatgttagagacgaaatggatacctttttccgacatgcagatagggagctaatgctggagatgtttcaggaagtgcttacaatttcgaaatag

SEQ ID NO: 454 - protein, 324 aa, Glycine max
MSDSKVETIARLAQWKIDNFGPCSFKRSDPFKLGIWNWFMSIERNRYLYIHIFPEPSRLSKEQPPVARFILRVSNSSGPTRKVYISPVHERVLRTSEDFVWPVDTAFLGRFVIDIEFLDLRTCPVNGETRSVWPSDGKLQTVAAQSTLRCLSHMLDEAIHADLTIITADGTLRAHKAVLSASSTVLHSLYLDNGDEKETSTINMEDMSQESCMALLSYLYGTIKQEDFWKHRLALLGAADKYEIGDLKDACEESLLEDLNSGNVLDRLNDAWLYQLQALKKGCFSYLFYYGKIYDVRDEMDTFFRHADRELMLEMFQEVLTISK

SEQ ID NO: 455 - DNA, 975 bp, Glycine max
atgtccgattcgaaggtcgaaaccatcgccagattagcccaatggaaaatcgacaacttcggaccctgctcctacaagaaatcagaccctttcaagctcggaatttggaactggttcatgtccatagagaggaacaggtacctctacatacacatctttccggagccttctcggcttactaaggaacagccacccgtggcacgcttcatcctgcgagtctccaacaactctggccctacccgcaaattttacatttcccctgttcatgaaagggtgcttaggacatgtgaagactttgtctggcctgttgatactgcattccttggtcgcttcgttattgatattgaatttcttgacctgaggacctgccccgtgaatggtgaaaccagatctgtatggccatctgatggaaaactgcaaactgttgcagctcaaagcactcttcgatgcttgtcccgtatgcttgatgaggctatacatgctgacctcaccattatcactgcagatggtaccctgagggctcataaggcagttttatctgcaagttctactgtgttccatagcttgtatcttcacaatggtgatgagaaagagacatctacaatccacatagaagatatgtctcaagaatcctgcatggcccttctgagttacttgtacggcactataaagcaacaagatttctggaagcacaggcttgcattgcttggagcagccaataaatatgagattggtgatctcaaagatgccagtgaggaaagcctactggaagatcttaactcgggaaatgttctggataggctaaatgatgcgaggctttaccagttgcacaagttaaagaaaggatgtttctcatacttatttgattttggtaagatatatgatgttagagatgaaatagatacctttttccgacatgcagatagggagctaatgctggagatgtttcaggaagtgcttacaatttcaaaatag

SEQ ID NO: 456 - protein, 324 aa, Glycine max
MSDSKVETIARLAQWKIDNFGPCSYKKSDPFKLGIWNWFMSIERNRYLYIHIFPEPSRLTKEQPPVARFILRVSNNSGPTRKFYISPVHERVLRTCEDFVWPVDTAFLGRFVIDIEFLDLRTCPVNGETRSVWPSDGKLQTVAAQSTLRCLSRMLDEAIHADLTIITADGTLRAHKAVLSASSTVFHSLYLHNGDEKETSTIHIEDMSQESCMALLSYLYGTIKQQDFWKHRLALLGAANKYEIGDLKDASEESLLEDLNSGNVLDRLNDARLYQLHKLKKGCFSYLFDFGKIYDVRDEIDTFFRHADRELMLEMFQEVLTISK

SEQ ID NO: 457 - DNA, 975 bp, Glycine max
atgtccgattcgaaggtcgaaaccatcgccagattagcccaatggaaaatcgacaacttcggaccctgctcctacaagagatcagatcctttcaagctcggaatttggaactggttcatgtccatagagaggaacaggtacctctacatacacatctttccggagccttctcggcttactaaggaacagccacccgtggcacgcttcatcctgcgagtctccaacaactctggccctacccgcaaattttacatttcccctgttcatgaaagggtgcttcggacatgtgaagactttgtctggcctgttgatactgcattccttggtcgcttcgttattgatattgaatttcttgacctgaggacctgccccgtgaatggtgaaaccagatctgtatggccatctgatggaaaactgcaaactgttgcagctcaaagcactcttcgatgcttgtcccgtatgcttgatgaggctatacatgctgacctcaccattatcactgcagatggtaccctgagggctcataaggcagttttatctgcaagttctactgtgttccatagcttgtatcttcacaatggtgatgagaaagagacatctacaatccacatagaagatatgtctcaagaatcctgcatggcccttctgagttacttgtacggcactataaagcaacaagatttctggaagcacaggcttgcattgcttggagcagccaataaatatgagattggtgatctcaaagatgccagtgaggaaagcctactggaagatcttaactcgggaaatgttctggataggttaaatgatgcttggctttaccagttgcaagcgttaaagaaaggatgtttctcatacttattttattatggtaagatttatgatgttagagatgaaatggatacctttttccgacatgcagatagggagctaatgctggagatgtttcaggaagtgcttacaatttcgaaatag

SEQ ID NO: 458 - protein, 324 aa, Glycine max
MSDSKVETIARLAQWKIDNFGPCSYKRSDPFKLGIWNWFMSIERNRYLYIHIFPEPSRLTKEQPPVARFILRVSNNSGPTRKFYISPVHERVLRTCEDFVWPVDTAFLGRFVIDIEFLDLRTCPVNGETRSVWPSDGKLQTVAAQSTLRCLSRMLDEAIHADLTIITADGTLRAHKAVLSASSTVFHSLYLHNGDEKETSTIHIEDMSQESCMALLSYLYGTIKQQDFWKHRLALLGAANKYEIGDLKDASEESLLEDLNSGNVLDRLNDAWLYQLQALKKGCFSYLFYYGKIYDVRDEMDTFFRHADRELMLEMFQEVLTISK

SEQ ID NO: 459 - DNA, 981 bp, Vitis vinifera
atgggggattcaaaggtggagacaatctcgagactagctcagtggaggatcgacaactttggaccctgttccttcaaaaagtccgatccattcaaggtcggaatctggaactggcacttatctattgagaagaataggtatatgtatattcgtctatttccggagccctccagagcttcaaaagaacagcctcctatagctagatttgttctccgcgtctccaattccgccgcctccaggaggccgtacatctcccctattcatgagagactgcttcggaccagtgatgactttgtctggcctgttgattccacctttcatggccgcttcgtcattgatgtcgagtttctggacttgaagatatgcccattgaatggtggggaagccagctcaatatggcccagtgatggagtgatgcaatctctagcagctcaaagcactcttcggtgcctctctcgcatgcttaatgaggcaatccatgccgatgtcaccattaacactgctgatggcactctaagagctcacaaggcaattttatcagcaagttcccctgtgttccaaagcatgttccttcacaacctcaaggagaagtcgtcctctacaatcgacatagaagacttgtctctggaatcttgcatggctctacttagttacttgtatggcaacataaaacaagaggatttctggaagcaccggctggcactgctgggagcggcaaacaagtatgacattacagacctaaaagatgcctgtgaggaaagcctattggaagacatcaactccggaaatgtcttggagaggctgcaggaagcatggctttaccagcttaacaagctcaaaaaaggatgcttgatgtacttactcgattttggtaagatatatgatgttagagaggaaatgaataacttcttcaggcaggctgacagggaactgatgctggagatgtttcaggaggtgcttacagtttggaaaccagcttaa

SEQ ID NO: 460 - protein, 326 aa, Vitis vinifera
MGDSKVETISRLAQWRIDNFGPCSFKKSDPFKVGIWNWHLSIEKNRYMYIRLFPEPSRASKEQPPIARFVLRVSNSAASRRPYISPIHERLLRTSDDFVWPVDSTFHGRFVIDVEFLDLKICPLNGGEASSIWPSDGVMQSLAAQSTLRCLSRMLNEAIHADVTINTADGTLRAHKAILSASSPVFQSMFLHNLKEKSSSTIDIEDLSLESCMALLSYLYGNIKQEDFWKHRLALLGAANKYDITDLKDACEESLLEDINSGNVLERLQEAWLYQLNKLKKGCLMYLLDFGKIYDVREEMNNFFRQADRELMLEMFQEVLTVWKPA

SEQ ID NO: 461 - DNA, 981 bp, Gossypium raimondii
atgggtgattcaaaggtcgaaaccatttccagattagctcaatggaggatcgacaactttagtccttgttcttacaaaaaatccgaccccttcaaggtcggtctttggaactggcacttgtctatagagaagaatcgatatatgtatattcgattatttcctgagccatctcgtgtgtctaaggagcagcctccttatgctaaattcatactcaggatctctaatgttggtgctaatcgtagactttatatctccccagttcatgatagaccgctgcgaacgtgtgatgacttttattggcctgttgattcttcattccatggacgcttcattattgatgttgagttcctggaccttaggatctgccccataaatggtggtgaaaccgtttcaatatggcctatggatggagcaatccagtctatgtcaactcaaacaaccctatgctgccttgctcgcatgcttgatgaaggtcttcatgcggatgttactatcaagactgctgaaggtactctaagagcacacaaagcagttctatctgcaagttctcctgttttcgagagtatgttccatcacaaccttaaggaaaaggagtcatccacaatccatatagatgacatgtcactggagtcttgcagggcccttctcaattacttgtatggaacaataaaccaagaggacttttggaagcatcgactgccattactgggagctgcaaataaatacgacattgtggatctcaaagatgcttgtgaggaaagccttttagaagacatcaactctcagaatgtccttgagaggctgcaggaggcttggctttaccaattgaccaagctgaaaaaggggtgcatgacatacttgtttgatttcggaaagatatatgatgttagagatgaaatcaataactttttcaggcaggcagaccgagaactgatgctggatatgtttcaagaagtgctgactgtttggaaaccggtatga

SEQ ID NO: 462 - protein, 326 aa, Gossypium raimondii
MGDSKVETISRLAQWRIDNFSPCSYKKSDPFKVGLWNWHLSIEKNRYMYIRLFPEPSRVSKEQPPYAKFILRISNVGANRRLYISPVHDRPLRTCDDFYWPVDSSFHGRFIIDVEFLDLRICPINGGETVSIWPMDGAIQSMSTQTTLCCLARMLDEGLHADVTIKTAEGTLRAHKAVLSASSPVFESMFHHNLKEKESSTIHIDDMSLESCRALLNYLYGTINQEDFWKHRLPLLGAANKYDIVDLKDACEESLLEDINSQNVLERLQEAWLYQLTKLKKGCMTYLFDFGKIYDVRDEINNFFRQADRELMLDMFQEVLTVWKPV

SEQ ID NO: 463 - DNA, 981 bp, Breassica napus
atgggggacacgaaggtggagacaatctcgaggttagcacaatggcggattgaaaactttggaccttgctctttcaaaaagtccgatcctttcaaagttggaatctggaattggcatctgtctatagagaggaatcgttacctatccgttaggctcttcccagaactctctcgtgtgtccaaggaacaacctcctattgctaaatttgttcttcgtgtctccaacgttggccctaaccgtaggctatacatctctcctgtctatgagaagctgctgcgtacgactgatgattgtgtgtggcatgtggactcaagcttccacggtcggttcaccattgatgtcgagttccttgatctcaaaatctgccctctgaatggtggtgaagcttctcctgtttggccaacggatacaacaatgcaatcaatctcaactcaaaccactctcaaatgcctatcccgtatgctagaagaaaacatcctctccgatgtaaccatccacacatccggcgggaccctttccgctcacaaagccatcctctcggccagctcaaacgtcttcaaaagcatgttccatcacgacctcaaggaaaaagagtcctccaccatccacatcgacgacatgtctagagagtcttgcatggcgctcctgagctacctctacggtaacataacgcaagaagacttctggaaacacaggctcgcgcttctcggtgctgccaacaagtacgatatcacggatctgaaagcggcctgtgaggagagcctgatggaagatattaactccgggaacgtgcttgagaggctgcaagaggcgtggctttatcagctggagaaactgaagaaagggtgtttgatgtatttgtttgatttcggcaagatttatgatgtcagagaggagatcagcggtttcttcaggcaggctgatcgtgagctgatgctggagatgtttcaggaggtcttgtcggtttggaaaccggtttga

SEQ ID NO: 464 - protein, 326 aa, Breassica napus
MGDTKVETISRLAQWRIENFGPCSFKKSDPFKVGIWNWHLSIERNRYLSVRLFPELSRVSKEQPPIAKFVLRVSNVGPNRRLYISPVYEKLLRTTDDCVWHVDSSFHGRFTIDVEFLDLKICPLNGGEASPVWPTDTTMQSISTQTTLKCLSRMLEENILSDVTIHTSGGTLSAHKAILSASSNVFKSMFHHDLKEKESSTIHIDDMSRESCMALLSYLYGNITQEDFWKHRLALLGAANKYDITDLKAACEESLMEDINSGNVLERLQEAWLYQLEKLKKGCLMYLFDFGKIYDVREEISGFFRQADRELMLEMFQEVLSVWKPV

SEQ ID NO: 465 - DNA, 981 bp, Arabidopsis lyrata
atgggggacacgaaggtggagacaatctcgaggttagctcaatggaggattgaaaattttggaccttgttctttcaaaaagtccgatccttttaaagtcggaatttggaattggcatctgtctatagagaggaatcgttatctatcagtgaggcttttcccagaactttctcgagtatctaaagagcaacctcctgttgccaaatttgttcttcgtgtctccaacgttggtcctaatcgtagattctacatctctccagtgtatgaaaaactgctgcgtacaactgatgattgtgtgtggcatgtggactccagcttccatggtcgattcaccattgatgtcgaatttctggatctcaaaatctgccctttgaatggtggtgaagcttctcctgtttggccaaccgattcaacaatgcaatcaatctccacacaaaccactctcaaatgcttatcccggatgctagaggaaagcatcctaaccgatgtaatcatccacacagccgatggagcactctctgctcacaaagctatcctctcggctagctctaccgttttcaaaagcatgttccaccacgacctcaaggaaaaagaatcatccacaatccacatcgacgacatgtcaagagaatcttgcatggctctactaagttacctctacggaaacataacccaagaagagttctggaaacacaggctcgccctcctcggtgctgcaaacaaatatgacataacggatttgaaagcagcgtgcgaagaaagcctaatggaagatataaactcgagtaatgtgctcgagagactacaagaggcttggctgtatcagctggagaaactgaagaaagggtgtttgatgtatttgtttgatttcggaaagatatatgatgtcagagaagaaatcagcaatttcttcaggcaagctgatcgagaactgatgctggagatgtttcaagaggttttgtctgtgtggaaaccggtctaa

SEQ ID NO: 466 - protein, 326 aa, Arabidopsis lyrata
MGDTKVETISRLAQWRIENFGPCSFKKSDPFKVGIWNWHLSIERNRYLSVRLFPELSRVSKEQPPVAKFVLRVSNVGPNRRFYISPVYEKLLRTTDDCVWHVDSSFHGRFTIDVEFLDLKICPLNGGEASPVWPTDSTMQSISTQTTLKCLSRMLEESILTDVIIHTADGALSAHKAILSASSTVFKSMFHHDLKEKESSTIHIDDMSRESCMALLSYLYGNITQEEFWKHRLALLGAANKYDITDLKAACEESLMEDINSSNVLERLQEAWLYQLEKLKKGCLMYLFDFGKIYDVREEISNFFRQADRELMLEMFQEVLSVWKPV

SEQ ID NO: 467 - DNA, 981 bp, Arabidopsis thaliana
atgggggacacgaaggtagagacaatctcgaggttagctcaatggagaattgaaaattttggtccttgttctttcaaaaagtccgatcctttcaaagtcggaatttggaattggcatctgtctatagagaggaatcgctatctatcagtgaggctattcccagaactttctcgagtatctaaagagcaacctcctgttgccaaatttgttcttcgtgtctccaacgttggccccaatcgtagattctacatctctcctgtttatgagaagctgctgcgtacaactgatgattgtgtgtggcatgttgactccagtttccacggtcgattcaccattgatgttgagtttcttgatctcaaaatctgccctgtgaatggtggtgaagcttctcctgtttggccaaccgatgcaacaatgcaatcaatctctactcaaaccactctcaaatgcttatcccggatgctagaggaaagcatactaaccgatgtaatcatccacacagccgatggaacactctctgctcacaaagctatcctctcagctagctcaactgttttcaaaagcatgttccaccacgacctcatggaaaaggaatcatccacaatccacatagacgacatgtcgagagaatcttgcatggctctactaagttacctctacggaaacataacccaagaagagttctggaaacacaggctcgccctcctcggcgctgcaaacaagtacgacataacggatttgaaagcagcctgcgaggagagcctaatggaagatataaactcgagtaatgtgctcgagaggctacaagaagcttggctttatcagctggagaaactgaagaaagggtgtttgatgtatttgtttgatttcggaaagatttatgatgtcagagaagaaatcagcagtttcttcaggcaagctgatcgagaactgatgctggagatgtttcaagaggttttgtctgtgtggaaaccggtctaa

SEQ ID NO: 468 - protein, 326 aa, Arabidopsis thaliana
MGDTKVETISRLAQWRIENFGPCSFKKSDPFKVGIWNWHLSIERNRYLSVRLFPELSRVSKEQPPVAKFVLRVSNVGPNRRFYISPVYEKLLRTTDDCVWHVDSSFHGRFTIDVEFLDLKICPVNGGEASPVWPTDATMQSISTQTTLKCLSRMLEESILTDVIIHTADGTLSAHKAILSASSTVFKSMFHHDLMEKESSTIHIDDMSRESCMALLSYLYGNITQEEFWKHRLALLGAANKYDITDLKAACEESLMEDINSSNVLERLQEAWLYQLEKLKKGCLMYLFDFGKIYDVREEISSFFRQADRELMLEMFQEVLSVWKPV

SEQ ID NO: 469 - DNA, 981 bp, Picea glauca
atgacggattcaaaggtggagacaactgcaaggcttgcacaatggaagattgaaagcttgggttcctgttcttaccggaggtcggaccccttcatagtcggaatctggaactggcacttgtcaattgagaagaacaggtatctatatattcgtctttttcctgagcctggtcgcatttctaaggaacaaccaccaattgcaacatttgtgcttcgcatattcaatgtaggagtaagtcgacgaccttggacatcgccagtctatgataagttgctccgcagcagtgaggattttgtatggcctatagattctagctttcatggacggtttataattgatgtggagtttctggacctgaaaattgctacaatgaatggtggagaagcttgttcaatatggcccaatgaaggagcaatgcagtgtcaagcaactaagggtgcattaaaatgcctttctcgtatgttggatgatggtctccacacggatgtaactattaatactgctaatggtagtgttagagcacatcgggctgttttagcagcacgatcctctgtttttgagagtatgttcttgcatgatctcaaagagaaagaatcatcaataattaatattgaagacatatctgttgaagcttgcatggctcttctaagctacatctatggaggtatcaaacatgaggacttttggaaccacaggatagctttactgagagctgctgataaatatgacattggggacttgaaagaatcttgcgaagaaagccttttggaggatatagattctaaaaatgttcttgagaggctgcaagaggcctggctttaccagcttagtcgactgaagaagtcatgcttgatgtacttgtttgactttggaaagatctatgatgtgagggatgatttgaacatgtttttccagcatgctgacagggaattgatgattgagatgattcaagaagtgctaaatgtttggagggtaggataa

SEQ ID NO: 470 - protein, 326 aa, Picea glauca
MTDSKVETTARLAQWKIESLGSCSYRRSDPFIVGIWNWHLSIEKNRYLYIRLFPEPGRISKEQPPIATFVLRIFNVGVSRRPWTSPVYDKLLRSSEDFVWPIDSSFHGRFIIDVEFLDLKIATMNGGEACSIWPNEGAMQCQATKGALKCLSRMLDDGLHTDVTINTANGSVRAHRAVLAARSSVFESMFLHDLKEKESSIINIEDISVEACMALLSYIYGGIKHEDFWNHRIALLRAADKYDIGDLKESCEESLLEDIDSKNVLERLQEAWLYQLSRLKKSCLMYLFDFGKIYDVRDDLNMFFQHADRELMIEMIQEVLNVWRVG

SEQ ID NO: 471 - DNA, 981 bp, Picea sitchensis
atgacggagtcaaaggtggagacaactgcaaggcttgcacaatggaagattgaaagcttgggttcctgttcttaccggaggtcggaccccttcagagtcggaatctggaactggcacttgtcaattgagaagaacaggtatctatatattcgtctttttcctgagcctggtcgcatttctaaagaacaaccaccaattgcaacatttgtgcttcgcatattcaatgtaggagtaagtcgacgaccttggacatcgccagtctatgataagttgctccgcagcagtgaggattttgtatggcctatagattctagctttcatggacggtttataattgatgtggagtttctggacctgaaaattgctacaatgaatggtggagaagcttgttcaatatggcccaatgaaggagcaatgcagtgtcaagcaactaagggtgcattaaaatgcctttctcgtatgttggatgatggtctccacacggatgtaactattaatactgctaatggtagtgttagagcacatcgggctgttttagcagcacgatcctctgtttttgagagtatgttcttgcatgatctcaaagagaaagaatcatcgataattaatattgaagacatatctgttgaagcttgcatggctcttctaagctacatctatggaggtatcaaacatgaggacttttggaaccacaggatagctttactgagagctgctgataaatatgacattggggacttgaaagaatcttgcgaagaaagccttttggaggatatagattctaaaaatgttcttgagaggctgcaagaggcctggctttaccagcttagtcgactgaagaagtcatgcttgatgtacttgtttgactttggaaagatctatgatgtgagggatgatttgaacatgtttttccagcatgctgacagggaattgatgattgagatgattcaagaagtgctaaatgtttggagggtaggataa

SEQ ID NO: 472 - protein, 326 aa, Picea sitchensis
MTESKVETTARLAQWKIESLGSCSYRRSDPFRVGIWNWHLSIEKNRYLYIRLFPEPGRISKEQPPIATFVLRIFNVGVSRRPWTSPVYDKLLRSSEDFVWPIDSSFHGRFIIDVEFLDLKIATMNGGEACSIWPNEGAMQCQATKGALKCLSRMLDDGLHTDVTINTANGSVRAHRAVLAARSSVFESMFLHDLKEKESSIINIEDISVEACMALLSYIYGGIKHEDFWNHRIALLRAADKYDIGDLKESCEESLLEDIDSKNVLERLQEAWLYQLSRLKKSCLMYLFDFGKIYDVRDDLNMFFQHADRELMIEMIQEVLNVWRVG

SEQ ID NO: 473 - DNA, 981 bp, Pinus taeda
atgaccgagtcaaaggtagagacaactgcaaggcttgcacaatggaggattgaaagcttgggctcctgctcttaccggaggtctgatgccttcagagtcggaatctggaactggcacttttcaattgagaagaacaggtatctatatattcgtcttttccctgagcctggtcgcatttctaaagaacaaccaccaattgcaacatttgtgcttcgcatattcaatgtaggagtaagtcgacgaccttggacatcaccagtctatgataagttgctccgcagcagtgaggatttcgtgtggcctatagattctagctttcatggacgttttataattgatgtggagttcctggacctgaaaattgctacaatgaatggtggagaagcttgttcaatatggcccaatgaaggagcaatgcagtgtcaagcaactaagggtgcattaaaatgcctttctcgtatgttggatgatggtcttcacacagatgtaactattaatactgctaatggtagtcttagagcacatcgggctgttttagcagcgcgatcccctgtttttgagagtatgttcttgcatgatctcaaagagaaagaatcatcgataattaatattgaagacatatctgtggaagcttgcatggctcttctaagctacatctatggaggtatcaaacatgaggacttttggaaccatagaatagctttattgagggctgctgataaatatgacattggggacttgaaagaatcctgtgaagaaagccttttggaggatatagattctaaaaatgttctcgagaggctgcaagaggcctggctttaccagctaagtcgactgaagaaatcatgcttgatgtatttgtttgactttggaaagatctatgatgtgagggatgatttgaacatgtttttccaacatgctgacagggagttgatgattgagatgtttcaagaagtgctaaatgtttggagggtaggataa

SEQ ID NO: 474 - protein, 326 aa, Pinus taeda
MTESKVETTARLAQWRIESLGSCSYRRSDAFRVGIWNWHFSIEKNRYLYIRLFPEPGRISKEQPPIATFVLRIFNVGVSRRPWTSPVYDKLLRSSEDFVWPIDSSFHGRFIIDVEFLDLKIATMNGGEACSIWPNEGAMQCQATKGALKCLSRMLDDGLHTDVTINTANGSLRAHRAVLAARSPVFESMFLHDLKEKESSIINIEDISVEACMALLSYIYGGIKHEDFWNHRIALLRAADKYDIGDLKESCEESLLEDIDSKNVLERLQEAWLYQLSRLKKSCLMYLFDFGKIYDVRDDLNMFFQHADRELMIEMFQEVLNVWRVG

SEQ ID NO: 475 - DNA, 981 bp, Carthamus tinctorius
atggtggataccaaggtagagacgatatccaggttggctcaatggaggatcgataatttcggaccttgtacttacaaaaggtccgaacctttcaaaatcggcatatggaactggcaattatcagtggagaagaatcggtatctctatattcgtctgtttccagagccctctcgggtggccaaggaacagcccccgattgccaaattcatactacgggtcaccactacgggaaccaatcgcagaccttatatctcacccatccatgaaagacttcttcggacaagtgaagactttgtctggcctgttgattctacgttccatggccgcttcatcattgatgttgagtttttggacctgcaggtttattcagtaaatggtgaggaagcaagttccatatggccgaatgatggaatgttgcgatcctcagcaagcgaaagcattcttcggtgcctttctcgcatgctacacgagtcaatcgatgctgatgtcaccattaacacaggggacggaactttgaaagctcacaaggccattctttccgcaagctctccggttttccatagcatgttcctacacaaccttcaggagaaagaatcctccaccatcaacatccaggacatgtcactcgaatcctgcaccgcccttctctcttatttatacggaaccattaagcaagaggatttctggaagcaccgcctttcactactgggtgccgccaacaagtatgcgatcacgagtttgaaggatttgtgtgaggagagcttgttggaagacataaactctggtaatgttctcgagaggctgcaagaggcctggctttaccagctggataagttgaagaagggatgtttgacatatttgtttgattttgggaagatatatgatcttagagatgaaattaacaacttctttaggactgcagagagagaattgattcaggagatgtttcaagaggtgcttactgtgtggaaaccagcatag

SEQ ID NO: 476 - protein, 326 aa, Carthamus tinctorius
MVDTKVETISRLAQWRIDNFGPCTYKRSEPFKIGIWNWQLSVEKNRYLYIRLFPEPSRVAKEQPPIAKFILRVTTTGTNRRPYISPIHERLLRTSEDFVWPVDSTFHGRFIIDVEFLDLQVYSVNGEEASSIWPNDGMLRSSASESILRCLSRMLHESIDADVTINTGDGTLKAHKAILSASSPVFHSMFLHNLQEKESSTINIQDMSLESCTALLSYLYGTIKQEDFWKHRLSLLGAANKYAITSLKDLCEESLLEDINSGNVLERLQEAWLYQLDKLKKGCLTYLFDFGKIYDLRDEINNFFRTAERELIQEMFQEVLTVWKPA

SEQ ID NO: 477 - DNA, 981 bp, Centaurea maculosa
atggtggatacccaggtagagaccatatcccgattggctccatggaggattgagaatttccgaccctgtacctccaaaaaatcccaaccctttcaaatccggctatggaactggccattatcagtggagaagaatcggtatctgtatattcctctgtttcccgagccctctcgggtggcccaggaacagccccccattgcccaattcatagtacgagtcaccactaccggaacccatcgcagaccttatatctcacccattcatgaaagacttcttcggacaagtgaagactttgtctggcctgttgattctactttccatggccgcttcatcattgatgttgagtttttggacctgcaggtttattcagtaaatggtgaggaagcaagtttcatatggccgaacgacggaatgctgcgatcatctgcaaacgaaagcattctccgttgcctttcccgcatgctaaacgagtcgatcgacactgatgtcaccatcaacacgggggacggaaccttgaaagcccacaaggccattctttccgcaagctctccggttttccacagcatgttcctacacaaccttcaggagaaagaatcctccaccatcaacatccaggacatgtcgctcgagtcctgcaccgcccttctctcttatctatacggaaccattaagcaagaggatttctggaagcaccggctttcgctactgggtgcggcaaacaagtacgcgatcacgagcttgaaggatttgtgcgaggagagcttgttggaagacataaactctggtaatgttcttgagaggctgcaagaggcctggctttaccagctggataagctgaagaaggggtgtttgacatatttgtttgattttgggaagatatatgatcttagagatgagattaacaacttctttaggactgcagagagggaattgatacaggagatgtttcaagaggtgcttactgtgtggaaaccagcatag

SEQ ID NO: 478 - protein, 326 aa, Centaurea maculosa
MVDTQVETISRLAPWRIENFRPCTSKKSQPFQIRLWNWPLSVEKNRYLYIPLFPEPSRVAQEQPPIAQFIVRVTTTGTHRRPYISPIHERLLRTSEDFVWPVDSTFHGRFIIDVEFLDLQVYSVNGEEASFIWPNDGMLRSSANESILRCLSRMLNESIDTDVTINTGDGTLKAHKAILSASSPVFHSMFLHNLQEKESSTINIQDMSLESCTALLSYLYGTIKQEDFWKHRLSLLGAANKYAITSLKDLCEESLLEDINSGNVLERLQEAWLYQLDKLKKGCLTYLFDFGKIYDLRDEINNFFRTAERELIQEMFQEVLTVWKPA

SEQ ID NO: 479 - DNA, 984 bp, Medicago trunatula
atggcggatagggttgacactgttgcaagactagcacaatggaaaatcgaaaacttcggtccttgttcttacaaaaaatctgatcctttcaagctcggaatctggaattggtatttttcaatagtaaggaataggttcttctccattcatctctttccagaaccttctaaagtttctaaggaccacccacccgttgctcgtttcatacttcgtgtctccgttgctggttcttcccgcaagtttattgtttctcctgtttatgaaaggctgcttaggacacaagatgactttgtctggcctattgatactgctttcgtgggtcgcttcatcattgatgttgaatttcttgacctgaagatatgccatatgaatggcggtgaacctagttctatatggtcatctgatggaacctcgcaatgcaatgaagctcaaagaagtactctccattgcctttcccgcatgctcgatgaggctatacatgctgacctaaccattatcacttctgatggtacattgagagctcacaaggcaattttgtctgcgagttctcctgtgtttcaaagcatgtttcatcacaacctgaaggaaaaagagtcgtcaacgatccatattgaagacatgtcacttgaatcctgcactgctcttcttagttacttgtatggagcaattaaacaagtagatttcaggaaacactgtcttgcattgcttggagcagctaataagtatgatattggtggtctgaaagatttatgtgaggaaaaccttcttgaagatattaactccgacaatgttcttgagatgctaaatgaggcttggctttatcagttacacaagttaaagaaaggatgtttaacattcttatttgaatttggtaaaatatatgatgttaaaactgatgaaataaataatcttttccagcacgcagatagggagctggttatggagatgtttcatgtgatgcttacaatttccaacccagaatag

SEQ ID NO: 480 - protein, 327 aa, Medicago trunatula
MADRVDTVARLAQWKIENFGPCSYKKSDPFKLGIWNWYFSIVRNRFFSIHLFPEPSKVSKDHPPVARFILRVSVAGSSRKFIVSPVYERLLRTQDDFVWPIDTAFVGRFIIDVEFLDLKICHMNGGEPSSIWSSDGTSQCNEAQRSTLHCLSRMLDEAIHADLTIITSDGTLRAHKAILSASSPVFQSMFHHNLKEKESSTIHIEDMSLESCTALLSYLYGAIKQVDFRKHCLALLGAANKYDIGGLKDLCEENLLEDINSDNVLEMLNEAWLYQLHKLKKGCLTFLFEFGKIYDVKTDEINNLFQHADRELVMEMFHVMLTISNPE

SEQ ID NO: 481 - DNA, 984 bp, Glycine max
atgggcgatagggtggaaacgcttgccagattagcccagtggaaaatcgacaacttcggactttgttcctacaaaaaatctgaccccttcaaggtcggaatctggaactggtacttttcaatagtgaggaataggtacctctacatacatctttttccagaaccttcgcaggttttgaaggataacccaccctttgctcgattcattcttcgagtctccaatgccggatcatcccgcagctttcatatttcccctgttcaagaaaagctgcttaggacacatgacgactttgtctggcctgtggatacaacttttgttggtcgcttcatcattgatgttgagtttctagacctaaagatatgccctcctaatggtggagaaactagtcctgtatggccatctgatggaaattctcaatccattgcatttcaaagtagcattcttcgttgcctctctcgtatgcttgatgaggctatacatgctgacctaactatcatgacagccgatggaagcacgttgagagctcataaggcagttctctcagcaagttccccagtgttccagagcatgtttcatcacaacctgaaggaaaaagagtcctccacgatccatatagaagacatgtcactcgagtcctgcacggctcttctaagttacttgtatggagcaatcaagcaagaagatttctggaaacaccggcttgcattgcttggagctgctaataaatatgacattggaagtctcaaagacatctgtgaggaaagcctcctggaagatctcagcacaggaaatgttcttgagatgctaaatgaggcttggctttatcaattgcacaagttaaagaaaggatgtttggtgttcttatttcaatttggtaagatacatgatattaaagatgaaataaataattttttccagcatgcagatagggagctaatgctggagatgtttcaggaggtgctttcaatttcgaacccgatatag

SEQ ID NO: 482 - protein, 327 aa, Glycine max
MGDRVETLARLAQWKIDNFGLCSYKKSDPFKVGIWNWYFSIVRNRYLYIHLFPEPSQVLKDNPPFARFILRVSNAGSSRSFHISPVQEKLLRTHDDFVWPVDTTFVGRFIIDVEFLDLKICPPNGGETSPVWPSDGNSQSIAFQSSILRCLSRMLDEAIHADLTIMTADGSTLRAHKAVLSASSPVFQSMFHHNLKEKESSTIHIEDMSLESCTALLSYLYGAIKQEDFWKHRLALLGAANKYDIGSLKDICEESLLEDLSTGNVLEMLNEAWLYQLHKLKKGCLVFLFQFGKIHDIKDEINNFFQHADRELMLEMFQEVLSISNPI

SEQ ID NO: 483 - DNA, 987 bp, Gossypium hirsutum
atgggtgattcaaaggtcgaaaccatctccagattagctcaatggaggatcgacaactttagtccttgttcttacaaaaaatccgaccccttcaaggtcggtctttggaactggcacttgtctatagagaagaatcgatatatgtatattcgattatttcccgagccatctcgtgtgtctaaggagcagcctccttatgctaaatttatactcaggatctctaatgttggtgctaatcgtagactttatatctccccagttcatgatagaccgctgcgaacatgcgatgacttttattggcctgttgattctacattccatggacgcttcattattgatgttgagttcctggacctgaggatctgccccataaatacccagggtggtgaaactgtttcaatatggcctatggatggagcaatccagtctatgtcaactcaaacaaccctacgctgccttgctcgcatgcttgatgaaggtcttcatgcggatgttactatcaagactgctgaaggtactctaagagcacacaaagcagttctatctgcaagttctcctgttttcgagagtatgttccatcacaaccttaaggaaaaggagtcatccacaatccatatagatgacatgtcactggagtcttgcacggcccttctcaattacttgtatggaacaataaaccaagagaacttttggaagcatcgactgccattactgggagctgcaaataaatacgacattgtggatctcaaagatgcttgtgaggaaagccttctagaagacatcaactctcagaatgtccttgagaggctgcaggaggcttggctttaccaattgaccaagctgaaaaaggggtgcatgacatacttgtttgatttcggaaagatatatgatgttagagatgaaatcaataactttttcaggcaggcagaccgagaactgatgctggatatgtttcaagaagtgctgactgtttggaaaccggtatga

SEQ ID NO: 484 - protein, 328 aa, Gossypium hirsutum
MGDSKVETISRLAQWRIDNFSPCSYKKSDPFKVGLWNWHLSIEKNRYMYIRLFPEPSRVSKEQPPYAKFILRISNVGANRRLYISPVHDRPLRTCDDFYWPVDSTFHGRFIIDVEFLDLRICPINTQGGETVSIWPMDGAIQSMSTQTTLRCLARMLDEGLHADVTIKTAEGTLRAHKAVLSASSPVFESMFHHNLKEKESSTIHIDDMSLESCTALLNYLYGTINQENFWKHRLPLLGAANKYDIVDLKDACEESLLEDINSQNVLERLQEAWLYQLTKLKKGCMTYLFDFGKIYDVRDEINNFFRQADRELMLDMFQEVLTVWKPV

SEQ ID NO: 485 - DNA, 987 bp, Poncirus trifoliata
  misc_feature (461)..(461): n is a, c, g, or t
atgagcgattctgcttatagggttgataccacgtcgcgtcttgctcaatggaggatagaaaatttggcttcctgttcttatcgcaagtccgatcctttcaagatcggcaagtggaattggcatttatctctggagaagaaccggatgttatttgttaaactgtatccagaggtatcgaatttaacaagagacaatcccccaattgcttctttcgttattcgagttgtcagttctgttggagatcgtaaagctttgtctcatccagaaatcacagacaggcagctcaagaataacgacgattttgtttgggcaattgaagtcccattaactgggaaattcatcattgacgttgaatttcttgatttgaagattgcaccttcagacggtggtggaccttgttccatttgggctgaaggaatcactcaaaaacgatcaaatgcaacagctcttgcatctcttgntagaatgttgacagaaggcatccacgcagacatcattattaatgcttccaatggaagcactggagctcatcgtgctgtgcttgctgcacgatcacctgttttccgcagcatgttttctcatgacttgaaagagaaagaactctcaaccattgacatccctgacatgtcaattgatgcctgccaagcttttctcagttatatttatgggaatattgaacatgaagaattcttgacccatcgattggctcttcttcgtgcagctgataaatatgacatctgcgacttgaaagaggcatgtcatgacagccttgtagaagatattgatacaaagaatgtacttgagagactccaaaatgcatatctctatgaattgccaaaactgaagagcagttgcatgcggtatcttgtgaagtttgggaagatatttgacattcgagatgacttcagtgtcttcttgcaatgtgcagacagggaacttatagctgaagtattccatgaagttcttggtgcctggaaaggtttctga

SEQ ID NO: 486 - protein, 328 aa, Poncirus trifoliata
  misc_feature (154)..(154): Xaa can be any naturally occurring amino acid
MSDSAYRVDTTSRLAQWRIENLASCSYRKSDPFKIGKWNWHLSLEKNRMLFVKLYPEVSNLTRDNPPIASFVIRVVSSVGDRKALSHPEITDRQLKNNDDFVWAIEVPLTGKFIIDVEFLDLKIAPSDGGGPCSIWAEGITQKRSNATALASLXRMLTEGIHADIIINASNGSTGAHRAVLAARSPVFRSMFSHDLKEKELSTIDIPDMSIDACQAFLSYIYGNIEHEEFLTHRLALLRAADKYDICDLKEACHDSLVEDIDTKNVLERLQNAYLYELPKLKSSCMRYLVKFGKIFDIRDDFSVFLQCADRELIAEVFHEVLGAWKGF

SEQ ID NO: 487 - DNA, 987 bp, Glycine max
atgagcgattctgcatacagagtcgaaaccacgccgcgccttgctcaatggagaatcgaaaacttggcttcttgcacttaccgaaaatccgatcctttcaagatcggaaactggaattggcatttgtcggtggagaaaaacagggttttgtttgttaaattgttcccagaaatatccaatcttacgagagacaaccccccaattgcatctttcatcgttcgggtggttagttctgttggagatcgcaaggccatcacacatccagaaataaaggacaaagtgttaaagaacaacgaggattttgtttgggcaattgaggttccactaactggaaaattcattattgacgtagagtttcttgatttgaagactgcatccccaaacggaggagaaccttgttccatttgggcagaaggatttactcagcaaagatcaaatgcaaaagccatagagtctcttggtagaatgctaacagaaggcatccacacggacatcaccatcaatgcttctgatggaagtattggagctcatagagctgttcttgctgccagatcacccgtcttccgcagcatgttctcacataatcttcaggagaaagaattgtcaaccataaacatctcagacatgtcacttgaatcatgccaggcttttctcaattatctttatgggatcatcaaacatgaagagtttctgactcataggctggcccttctgcacgcggccgacaagtatgacatatctgatttgaaagatgtatgccatgagagtcttctagaagatattgatacaaagaatgtacttgataggctccaaaatgcatctctatatcagttgatgaaactgaagatgagttgcatccgatatcttgtgaagtttggtaaaatatatgaaattcgtgatgatttcaataccttcctgcaaaatgcagatagggatctgattgctgaggtcttccatgaagttcttgatgcttggaaaggattctga

SEQ ID NO: 488 - protein, 328 aa, Glycine max
MSDSAYRVETTPRLAQWRIENLASCTYRKSDPFKIGNWNWHLSVEKNRVLFVKLFPEISNLTRDNPPIASFIVRVVSSVGDRKAITHPEIKDKVLKNNEDFVWAIEVPLTGKFIIDVEFLDLKTASPNGGEPCSIWAEGFTQQRSNAKAIESLGRMLTEGIHTDITINASDGSIGAHRAVLAARSPVFRSMFSHNLQEKELSTINISDMSLESCQAFLNYLYGIIKHEEFLTHRLALLHAADKYDISDLKDVCHESLLEDIDTKNVLDRLQNASLYQLMKLKMSCIRYLVKFGKIYEIRDDFNTFLQNADRDLIAEVFHEVLDAWKGF

SEQ ID NO: 489 - DNA, 987 bp, Vitis vinifera
atgagcgactccgcatacagagtcgaaaccacgtcgcgcctcgcccaatggaggatcgacaacctggcttcctgcacttaccgcaagtccgatcctttcaagatcggcaagtggaattggcatttatctatagagaagaatcggacattatctgttaaactgtacccggaaacatcaaatttaaccagagacaaccccccaattgcgtctttcatcatcagagtgctctcttctgtgggagatcgcaaggctttggttcatccagaaataacagacaagcagctcaagaataacgacgatttcgtttgggcgattgaggttccattaactgggaaattcattgtcgacgttgaattcctagatttgaagacttcatcaccaaacggtggagagccttgctccatctgggctgaaggattcgctcaaaaaagatcaagtacaacagctcttgcatcccttggccggatgttgtcagaaaacatccacacagacattataattaatgcttctgatggaagcattggagctcatcgtgcggttctggcctcaatatcccctgtttttcgcagcatgttttcacatgacctcaaagagaaagaactatccaccgtaaacatctctgacatgtcaattgaagcctgccaagcttttctcaattacatttatgggaatatccaacacgatgaatttctgatccacaggctgccacttctccgtgcagctgataagtacgacattgaagacctgaaagaggcatgccatgagagtcttttagaagatattgacactaagaatgtgctggagaggctccaaaatgcatctctttatcaattgtcaaaactgaaaactgcctgcttgcgatatcttgtgaagtttggtaagatatttgacattcgagatgatttcaatgcctttctgcagtgtgcagatagggacctgattgctgaagtcttccatgaagtcctcactgcctggaaaggtttctga

SEQ ID NO: 490 - protein, 328 aa, Vitis vinifera
MSDSAYRVETTSRLAQWRIDNLASCTYRKSDPFKIGKWNWHLSIEKNRTLSVKLYPETSNLTRDNPPIASFIIRVLSSVGDRKALVHPEITDKQLKNNDDFVWAIEVPLTGKFIVDVEFLDLKTSSPNGGEPCSIWAEGFAQKRSSTTALASLGRMLSENIHTDIIINASDGSIGAHRAVLASISPVFRSMFSHDLKEKELSTVNISDMSIEACQAFLNYIYGNIQHDEFLIHRLPLLRAADKYDIEDLKEACHESLLEDIDTKNVLERLQNASLYQLSKLKTACLRYLVKFGKIFDIRDDFNAFLQCADRDLIAEVFHEVLTAWKGF

SEQ ID NO: 491 - DNA, 987 bp, Glycine max
atgagcgattctgcatacagagtccaaaccacaccgcgccttgctcaatggagaatcgaaaacttggcttcttgcacttaccgcaaatcagatcctttcaagatcggaaactggaattggcatttgtcggtggagaaaaacagggttttgtttgttaaattgttcccagaaatatccaatcttacgagagacaaccccccaattgcatctttcatcgttcgggtcgttagttctgttggaggtcgccaggccatcacacatccagaaataaaggacaaagtgttaaagaacaacgaggattttgtttgggcaattgaggttccactaactgggaaattcattattgacgtagagtttcttgatttgaagactgcatccccaaacggtggagaaccttgttccatttgggcagaaggatttactcagcaaagatcaaatgcaaaagccatagagtctcttggtagaatgctaacagaaggcattcacacagacatcaccatcaatgcttctgatggaagtataggagctcatagagctgttcttgctgccagatcacctgtcttccgcagcatgttctcacataatcttcaggagaaagagttatcaaccataaacatctcagacatgtcacttgaatcatgccaggcttttctctattatctttatgggataatcaaacatgaagagtttctgactcataggctggcccttctgcaggcggctgacaagtatgacatatctgacttgagagatgtatgccacgaaagtcttctagaagatattgacacaaagaatgtacttgagaggctccaaaatgcatctctatatcagttgatgaaactgaagatgagttgcatccgatatcttgtgaagtttggtaaaatatatgaaattcgcgatgatttcaataccttcctgcgaaatgcagatagggatctgatttctgaagtcttccatgaagttcttgatgcttggaaaggattctga

SEQ ID NO: 492 - protein, 328 aa, Glycine max
MSDSAYRVQTTPRLAQWRIENLASCTYRKSDPFKIGNWNWHLSVEKNRVLFVKLFPEISNLTRDNPPIASFIVRVVSSVGGRQAITHPEIKDKVLKNNEDFVWAIEVPLTGKFIIDVEFLDLKTASPNGGEPCSIWAEGFTQQRSNAKAIESLGRMLTEGIHTDITINASDGSIGAHRAVLAARSPVFRSMFSHNLQEKELSTINISDMSLESCQAFLYYLYGIIKHEEFLTHRLALLQAADKYDISDLRDVCHESLLEDIDTKNVLERLQNASLYQLMKLKMSCIRYLVKFGKIYEIRDDFNTFLRNADRDLISEVFHEVLDAWKGF

SEQ ID NO: 493 - DNA, 987 bp, Aquilegia sp.
atgagtgaatctgcttatagagtcgaaactcaatctcgacttgctcaatggagaattgacagtttgtcgtcttgtacttatcgcaaatcggatccttttaagattggtaactggaattggcatttatcagtcgagaagaatcgaggtgtgtatattaagttattccccgttgtatcgaatttaaccagagaaaatcccccgattgcgtcttttatcattcgtgttctctgttcacatggtaaccgccatgctctgcttcatccaggagtgactgataagcagatcaagaccaatgatgattttatttgggcgattgagactccattaactgggaagtttataattgacattgagtttttagatttaaaagcagtttcccagaacggcggtgaaccatgttctatttggtcagaaggattggtgcagagacgatcgaatgcaacagctcttgcaacacttgggagaatgttgtcagaaagtattcacacggatataacaatcaatgcttcgaatgggagcattggggcacaccgtgccatcctttcctcaagatcacctgtcttccagagcatgttttcgcacaatctcagagagaaggaactgtcaactataaacatctctgatatgtcaattgaagcttgccaagtgttcctaaattatgtctatggttctatccagcatggagagtttctgacccaccgaattgctcttctcggtgcagctgataagtatgacatttctgacctgaaagaagcatgtcatgagagcctactagaagatattgataccaagaatgtactcgagaggctccaaactgcatatctctaccaattgccaagactcaagggaagctgcatgaggtatcttataaagtttggtaagatatatgacattcgggatgatttcaacgcttttttacaaagtgcagatagggatattgtagctgaaatcttccaggaggtccttgctgcctggaaaggtttctga

SEQ ID NO: 494 - protein, 328 aa, Aquilegia sp.
MSESAYRVETQSRLAQWRIDSLSSCTYRKSDPFKIGNWNWHLSVEKNRGVYIKLFPVVSNLTRENPPIASFIIRVLCSHGNRHALLHPGVTDKQIKTNDDFIWAIETPLTGKFIIDIEFLDLKAVSQNGGEPCSIWSEGLVQRRSNATALATLGRMLSESIHTDITINASNGSIGAHRAILSSRSPVFQSMFSHNLREKELSTINISDMSIEACQVFLNYVYGSIQHGEFLTHRIALLGAADKYDISDLKEACHESLLEDIDTKNVLERLQTAYLYQLPRLKGSCMRYLIKFGKIYDIRDDFNAFLQSADRDIVAEIFQEVLAAWKGF

SEQ ID NO: 495 - DNA, 987 bp, Solanum lycopersicum
atgacagacagcaaggtagagactctatcaaggttagctcaatggaggatcgacaatttcacagcatctacttacaaaagatctgacccttttaaaattggtatatggaactggcatctgtcaattgagaagaatcggtatttgtatattcgattgtttcctgaaccttctcggctttcgaaagagcagcttcctcctccttttgctcgctttatgcttcgtgttactacaactggaaccaatcggagacctcatatatctcctgtatatgagaggctgcttcgaacaagtgatgactttgtgtggcctattgattcttgtttacaaggtcgatttgtcattgatgttgagttccttgacctgaagatctacaccccaaatggtggagaaggaaaatctatatggcccaatgacatgattttgcaatctttagctacccaaagtactctccgatgcctctctcgcatgcttgatgagtccatccatactgatgttaccattaatacggctgatggatcagtgcaagctcacagagcgatactgtctgctacttctcctgtattccacagcatgttccttcacgatctcagggagaaagagtcctctataatcgacatagaagacatgtcaacagaatcatgcacagcgcttcttagttacttgtatggaaccataaaacaagaggatttctggaagcaccgattggcattactgggtgcggcaaacaagtatgatattgtagatttgaagaatgcttgtgaggaaagtctcctagaagacatcaactcgggtaatgtcctcgaaagactgcaagaggcctggctttaccagctaaataaattgaaaaaaggttgcttgatgtatttgttcgattttggcaagatttatgatgttagggaggaaattaacaacttcttcagacaggcagatagagatctgatgctagagatgtttcaagaagtgctcacagtttggaagcctgcctaa

SEQ ID NO: 496 - protein, 328 aa, Solanum lycopersicum
MTDSKVETLSRLAQWRIDNFTASTYKRSDPFKIGIWNWHLSIEKNRYLYIRLFPEPSRLSKEQLPPPFARFMLRVTTTGTNRRPHISPVYERLLRTSDDFVWPIDSCLQGRFVIDVEFLDLKIYTPNGGEGKSIWPNDMILQSLATQSTLRCLSRMLDESIHTDVTINTADGSVQAHRAILSATSPVFHSMFLHDLREKESSIIDIEDMSTESCTALLSYLYGTIKQEDFWKHRLALLGAANKYDIVDLKNACEESLLEDINSGNVLERLQEAWLYQLNKLKKGCLMYLFDFGKIYDVREEINNFFRQADRDLMLEMFQEVLTVWKPA

SEQ ID NO: 497 - DNA, 987 bp, Gossypium raimondii
atgaccgagtctgcttacagagtcgaaaccaccgctcgtcttgctcaatggaggatagataatcttgccttttgcacttaccgcaaatccgatcctttcaagatcggcaactggaattggcatttgtcaatggagaagaacagggtattgtatgttaaattatacccagaaatttcgaatctaacaagagacaatcccccaattgcatccttcatcatccgagttgtatgctcagcaggggatcgaaaggctttcactcatccagaaataaaagacaaacagctgaagagcaacgaagattttgtctggccgatcgaggttcctttgacggggaaattcataatcgacgttgaatttcttgatctaaaaaccgcatctccaaacggtggggaaccttgctccatttgggctgaaggactcacacaaaagcaatcaaatgccacagctcttgcatgccttggtcggatgttaacacaaagcatccacacagatatcattattaatgcttctaatggaagcattggagctcatcgtgctgttctttctgcacgatcgcctgtttttcacagcatgttttcacataacctgcaagaaaaagaactgtcaaccataaacatatctgacatgtcaattgaagcttgtcaggctttgctatgttacatttatggaaacatcaaacatgaagaattcctggctcaccggctggcacttctccgggcagctgataagtatgatatatcggatttgaaagaggcctgccacgagagtctcctagaagatattgatacaaagaatgtccttgagagactccaaaatgcagctttataccaattgccaaaactcaagtccagttgcatgggatattttgtgagatttggcaagatatatgatattcgagatgattttaatgctttcctgcaatgtgcagacagggagctgataactgatatattccatgaagttttaaatacctggaaaggattttaa

SEQ ID NO: 498 - protein, 328 aa, Gossypium raimondii
MTESAYRVETTARLAQWRIDNLAFCTYRKSDPFKIGNWNWHLSMEKNRVLYVKLYPEISNLTRDNPPIASFIIRVVCSAGDRKAFTHPEIKDKQLKSNEDFVWPIEVPLTGKFIIDVEFLDLKTASPNGGEPCSIWAEGLTQKQSNATALACLGRMLTQSIHTDIIINASNGSIGAHRAVLSARSPVFHSMFSHNLQEKELSTINISDMSIEACQALLCYIYGNIKHEEFLAHRLALLRAADKYDISDLKEACHESLLEDIDTKNVLERLQNAALYQLPKLKSSCMGYFVRFGKIYDIRDDFNAFLQCADRELITDIFHEVLNTWKGF

SEQ ID NO: 499 - DNA, 987 bp, Gossypium hirsutum
atgaccgagtctgcttacagagtcgaaaccaccgctcgtcttgctcaatggaggatagataatcttgccttttgcacttaccgcaaatccgatcctttcaagatcggcaactggaattggcatttgtcaatggagaagaacagggtattgtatgttaaattatacccagaaatttcgaatctaacaagagacaatcccccaattgcatccttcatcatccgagttgtatgctcagcaggggatcgaaaggctttcactcatccagaaataaaagacaaacagctgaagagcaacgaagattttgtctggccgatcgaggttcctttgacggggaaattcataatcgacgttgaatttcttgatctaaaaaccgcatctccaaacggtggggaaccttgctccatttgggctgaaggactcacacaaaagcaatcaaatgccacagctcttgcatgccttggtcggatgttaacacaaagcatccacacagatatcattattaatgcttctaatggaagcattggagctcatcgtgctgttctttctgcacgatcgcctgtttttcacagcatgttttcacataacctgcaagaaaaagaactgtcaaccataaacatatctgacatgtcaattgaagcttgtcaggctttgctatgttacatttatggaaacatcaaacatgaagaattcctggctcaccggctggcacttctccgggcagctgataagtatgatatatcggatttgaaagaggcctgccacgagagtctcctagaagatattgatacaaagaatgtccttgagagactccaaaatgcagctttataccaattgccaaaactcaagtccagttgcatgggatatcttgtgagatttggcaagatatatgatattcgagatgattttaatgctttcctgcaatgtgcagacagggagctgataactgatatattccatgaagttctaaatacctggaaaggattctaa

SEQ ID NO: 500 - protein, 328 aa, Gossypium hirsutum
MTESAYRVETTARLAQWRIDNLAFCTYRKSDPFKIGNWNWHLSMEKNRVLYVKLYPEISNLTRDNPPIASFIIRVVCSAGDRKAFTHPEIKDKQLKSNEDFVWPIEVPLTGKFIIDVEFLDLKTASPNGGEPCSIWAEGLTQKQSNATALACLGRMLTQSIHTDIIINASNGSIGAHRAVLSARSPVFHSMFSHNLQEKELSTINISDMSIEACQALLCYIYGNIKHEEFLAHRLALLRAADKYDISDLKEACHESLLEDIDTKNVLERLQNAALYQLPKLKSSCMGYLVRFGKIYDIRDDFNAFLQCADRELITDIFHEVLNTWKGF

SEQ ID NO: 501 - DNA, 990 bp, Lactuca saligna
atgaccgccgataacgcttaccgtgttgataccacgtcacgcctcgctcaatggcgtatcgacaatttggcttcttgtacttatcgtaaatccgatcctttcgagatcggtaaatggaactggcgattggttattgaaaagaatcgtaatctgtacattaaattgtacccagagatatcgggtttaactaaagaaacccctccaatagcttccttcatcattcgagtggtttcttctttaggaggtcgaaaagctttagttcatccagaaatcagagataaacagcttaaaactagcgacgattttgtttgggcacttgaagttccacttacaggcaaattcatcatcgatcttgagtttcttgaccttaaaaccgcatctccaaacggtggtgaatcgtgctctgtttggacggaaggtttaacacaaaaggatttaaaatcaaccgcgatttcctcccttggaaaaatgttatctgaaagcatccacacagatatcatcatccatgcttcagatggaagcatgggggcccaccgggcagtactggctgcccggtcgcctgtcttccaaagcatgttttctcatgacctaaaagaaaaagaaatgtccgccataaacatctctgacatgtccattgaagcttgccaagcttttttgagttacatttatggtaacattgaagaacaaaactttcttgttcatagactccatcttcttagagcagctgataagtatgatgttgtggatttaaaggaagcatgccatgaaagcttattggaagatattgatacgaataatgttcttgagaggcttcaaattgcttctttatatcgtcttgaaaagctgaagatttgctgcatgcagtatcttgtgaggtttgggaagatatttgacattttagaggaatttgatgcgtttataaaaactgcagacagagaactcatagctgaagtgtttaatgaaattctttctgtctggaaaggtttctga

SEQ ID NO: 502 - protein, 329 aa, Lactuca saligna
MTADNAYRVDTTSRLAQWRIDNLASCTYRKSDPFEIGKWNWRLVIEKNRNLYIKLYPEISGLTKETPPIASFIIRVVSSLGGRKALVHPEIRDKQLKTSDDFVWALEVPLTGKFIIDLEFLDLKTASPNGGESCSVWTEGLTQKDLKSTAISSLGKMLSESIHTDIIIHASDGSMGAHRAVLAARSPVFQSMFSHDLKEKEMSAINISDMSIEACQAFLSYIYGNIEEQNFLVHRLHLLRAADKYDVVDLKEACHESLLEDIDTNNVLERLQIASLYRLEKLKICCMQYLVRFGKIFDILEEFDAFIKTADRELIAEVFNEILSVWKGF

SEQ ID NO: 503 - DNA, 990 bp, Arabidopsis thaliana
atgactgattctgcttacagagtagacaccatttctagactcgcccaatggcgaatccacaatctttcttcctccacttaccgcaagtccgatcctttcaagatgggtctttggaattggcacttgtctgtggagaaaagcaagatgctattaaatgttaagttgtatccagaggtatcaaaccttaccagagaaaatccaccggttgcttcctttgctcttcgtgttgtctcttctactggtgagagaaaggctctatctcatccagaagtaatagataagcggattaagacaaacgaagattttatttggactattgaagttcccttaactgggaaaatcatcatcgacgtcgagtttcttgacttgaaggttttgtctcaagatagtggagaactttactctatctgggccaacggttcaactgagaatcaatcgcaagtaactgcggtaacatcccttggacgtatgttgacagaaagcatttacaccgacataacgatcaatgcctctgatggaagcattggagctcaccgagcagttctcgctgcccgttcacctgttttccgcagcatgtttttacacgacctgaaagagaaagaactatcagaaataaacgtactcgacatgccacttgatgcttgccaagcttttctcagttatatctacggcaatatccaaaacgaagactttcttatacacagattggcactcctccaagcagctgagaaatatgatattgctgatttaaaagaggcgtgccacttgagtcttctagacgatatcgacacaaagaatgtgcttgagaggctacagaatgcttatctctatcaattacctgaactgaaggctagctgcatgagatatcttgtgaagtttggcaaaatatttgagatccgagacgagttcaacatattcatgcaatgcgcagacagagatttgatttctgaaatcttccacgaagtcctcagtacctggaaaggattttag

SEQ ID NO: 504 - protein, 329 aa, Arabidopsis thaliana
MTDSAYRVDTISRLAQWRIHNLSSSTYRKSDPFKMGLWNWHLSVEKSKMLLNVKLYPEVSNLTRENPPVASFALRVVSSTGERKALSHPEVIDKRIKTNEDFIWTIEVPLTGKIIIDVEFLDLKVLSQDSGELYSIWANGSTENQSQVTAVTSLGRMLTESIYTDITINASDGSIGAHRAVLAARSPVFRSMFLHDLKEKELSEINVLDMPLDACQAFLSYIYGNIQNEDFLIHRLALLQAAEKYDIADLKEACHLSLLDDIDTKNVLERLQNAYLYQLPELKASCMRYLVKFGKIFEIRDEFNIFMQCADRDLISEIFHEVLSTWKGF

SEQ ID NO: 505 - DNA, 990 bp, Arabidopsis lyrata
atgactgattctgcttacagagtagacaccatttctagactcgcccaatggcgaatccacaatctttcttcctccacttaccgcaagtccgatcctttcaagatgggtctttggaattggcacttgtctgtagagaaaagcaagatgctattaaatgttaagttgtatccagaggtatccaaccttaccagagaaaacccaccagttgcttcctttgttcttcgtgttgtctcttctgctggtgataggaaagttttatctcatccagaagtaatagataagcggattaagacaaacgaagattttatttggactattgaagttcccttaactgggaaaatcatcatcgacgtcgagtttcttgacttgaaggttctgtctcaagatagtggagaaatttactctatctgggcagacggttcaacagagaatcaatcgaaagggacagcggtcacatcccttggacgtatgttgacagaaagcatttacactgacataatgatcaatgcttctggtggaagcattggagctcaccgagctgttcttgctgcccgctcacctgttttccgcagcatgtttttacacgacctgaaagagaaagaactatcagaaataaacatactcgacatgccacttgatgcttgccaagcttttctcagttatatctacggcaatatccagaacgaagactttcttatacacagattggcactcctccaagctgctgaaaaatatgatattgctgatttaaaagacgcgtgccacttgagccttctagacgacatcgacacaaagaatgtgcttgagaggctacagaatgcttatctctatcaattacctgaactgaaggctagctgcatgaggtatcttgtgaagtttggtaagatatttgaaatctgcgatgagttcaacatattcatgcaatgcgcagacagagatttgatttctgaagtcttccacgaagtcctcagtacctggaaaggattttag

SEQ ID NO: 506 - protein, 329 aa, Arabidopsis lyrata
MTDSAYRVDTISRLAQWRIHNLSSSTYRKSDPFKMGLWNWHLSVEKSKMLLNVKLYPEVSNLTRENPPVASFVLRVVSSAGDRKVLSHPEVIDKRIKTNEDFIWTIEVPLTGKIIIDVEFLDLKVLSQDSGEIYSIWADGSTENQSKGTAVTSLGRMLTESIYTDIMINASGGSIGAHRAVLAARSPVFRSMFLHDLKEKELSEINILDMPLDACQAFLSYIYGNIQNEDFLIHRLALLQAAEKYDIADLKDACHLSLLDDIDTKNVLERLQNAYLYQLPELKASCMRYLVKFGKIFEICDEFNIFMQCADRDLISEVFHEVLSTWKGF

SEQ ID NO: 507 - DNA, 993 bp, Physcomitrella patens
atggcagactgtatttccaaagtggagacaaccacaaggcttgttcaattgcgtgtggacagcctcggaactggctgttatcgtcgatcagatcctttcaaaatcggcctctggaactggcatatactcatcgagaaaaaggcatccctgatcgtgcgtctatacccagaacattgccgcaaggagccatcgcccattgccactttcacggttcggattctggtccgaggtagcgatggtcaacgtgtggaatccaaggttagtgacaagttgcttcggagcagctctgatgacttcatgtggccattagaatactctgtggcatacggtagatttcttgtggaaattgaatttcacgatttgaaagtagcatcctcgcatagtggcgatccacattctatctggacaggcgaagaatacttacaatcgcgagctgaggttggtatagcccggtgcctgtctcgaatgctggaagagggtcttcacaccgacgtgacgatttgctcggccactggttgcgtaggcgctcaccgcgctatccttgcagcacgttcccctgttttcgattccatgttctcccacaacttgatggaaaagcagtccgccacagttcgcataaacgacatgtgcctggagtcttgtcgtgcgctcctcagctttttgtatgggaatttgaaatacccagactttcgaaaacacagggttgccctcgtgcgggcggcgcacaaatatgacatcgtggacctgaaggaggcctgcgagtcgagcttagtagacgacatcgacggtagcaatgtgttagtcaggctgcatgacgcatggctctaccagctcaaggatctgaagcgtgagtgtttgcgctacctgcttgaatttggtaaggtccatgacttgcgcaacgagttcgacgcattcctgcaagacgtcgacaaggatctcgtagttgagcttgtgcaggaacaaatcaaactgctcaaaatacatggcttgtaa

SEQ ID NO: 508 - protein, 330 aa, Physcomitrella patens
MADCISKVETTTRLVQLRVDSLGTGCYRRSDPFKIGLWNWHILIEKKASLIVRLYPEHCRKEPSPIATFTVRILVRGSDGQRVESKVSDKLLRSSSDDFMWPLEYSVAYGRFLVEIEFHDLKVASSHSGDPHSIWTGEEYLQSRAEVGIARCLSRMLEEGLHTDVTICSATGCVGAHRAILAARSPVFDSMFSHNLMEKQSATVRINDMCLESCRALLSFLYGNLKYPDFRKHRVALVRAAHKYDIVDLKEACESSLVDDIDGSNVLVRLHDAWLYQLKDLKRECLRYLLEFGKVHDLRNEFDAFLQDVDKDLVVELVQEQIKLLKIHGL

SEQ ID NO: 509 - DNA, 993 bp, Medicago trunatula
atgaatgattatgcttatgcatacaaagttgaaaccatgaatcgtctagttcaatggaaaattcacaatttatcaacatgcacttatatcaaagctgatccattcaaaatagccatgtggaactggcatttatcagtggaaaagaattgtggtttacgtattgaattatatccagaaatgtctaaaacaatcgcgcacaatcctccaattgcatctttcatagttaggattcttagttatgctggaaatagcaaaatcttgactcaatcagaaataaaagataaacctcttagcaataaggatagctttgtgtgggagataggggttccattacctggaaaattcataattgacattgagtttctggatttgaaaactacatgtccaaagggtggggaagctggctctatttggcctagcggatttatgcagcagagacaaaatgcagcggcccttgaatccctaggtcgaatgataagagaagatatctatacagacataacaatcaacgtcaattccgagggaaacataagagctcatcgagctgttctgtcttcacaatcatctgtgtttcgcagcatgttttcacataatgttaaggagactgatttgtctacgataaacatcaccgacatgtcaattcaatcttttcagacgtttataaattttctttatggaaatgttaatgatgaagagtttcttatgcatagattggacctattacatgcagctgacaagtatgacatctatgagttaagagaggcatgtcaaaagagtcttcaagaagatattgatccaaaaaatgtacttgagagactccaaattgcatctttgtatcaattaacaacattgaagtttagttgtatgcaatatcttgtgaaatttggcaaaatatatgatattcagggtgatttaagttcattcttgcaaactgctgatagagatttgatatgcgaagtcttcaatgaaattcttgatgcttggaaaaagtga

SEQ ID NO: 510 - protein, 330 aa, Medicago trunatula
MNDYAYAYKVETMNRLVQWKIHNLSTCTYIKADPFKIAMWNWHLSVEKNCGLRIELYPEMSKTIAHNPPIASFIVRILSYAGNSKILTQSEIKDKPLSNKDSFVWEIGVPLPGKFIIDIEFLDLKTTCPKGGEAGSIWPSGFMQQRQNAAALESLGRMIREDIYTDITINVNSEGNIRAHRAVLSSQSSVFRSMFSHNVKETDLSTINITDMSIQSFQTFINFLYGNVNDEEFLMHRLDLLHAADKYDIYELREACQKSLQEDIDPKNVLERLQIASLYQLTTLKFSCMQYLVKFGKIYDIQGDLSSFLQTADRDLICEVFNEILDAWKK

SEQ ID NO: 511 - DNA, 993 bp, Oryza sativa
atgagcgacggggcgcgcgtggaggcggcgccgcggctcgcgcaatggcgcgtcgacgtgctcccctgctacacctaccgcaagtccgagcccttccgcatcggcctctggaactggtacctatctgtggagagaaataacaagcaaacttgtgttaaggtctttgcggagttatcgaattctgccaagaatacaaccccagcccctattgcttccttcatcacaaaacttctcatatcttttcctccaaatcagaagaccatagttcatccaggaatttttgacaagccgctgaaacacgaaggttttgtgtgggcaattgatagtactgttacaggaagatttgtgattgagatagagtttcttgacctgaaaattgcagatccatctggtggtgaaccagcctcaatttgggcttcccaccaaatcaagaaatcttcagacaacactgcactgtcatccttggcgagaatgctgcaagaaggcatcctcaccgacatcacaatcaacgctaccgacggcagcattatggcccaccgtgcaatcctggccagccgttcccctgtcttcaggagcatgttctcgcacgacctcaaggagaaagaactctcaacagttgacatctctgacatgtcccttgaagcatgccaggccttcctcaactacatttatggtgacctacgcagcgaagagttcctcacccacaggttagctcttctcagagctgccgataagtatgacatctctgatcttaaggaggcatgccatgagagcctgttagaggacatcgacacgaagaatgtgctcgagaggcttcagatggcgcacttgtaccgattgcaaaagctcaaggatggctgcttgagatttctggtagatttcagaaaggtgtatgaaatgcatgacgatttcaaggtgttcctccagacagcagacagggatatcatagctgaaatcttccaaggtattcttacaacatggagtgggcgataa

SEQ ID NO: 512 - protein, 330 aa, Oryza sativa
MSDGARVEAAPRLAQWRVDVLPCYTYRKSEPFRIGLWNWYLSVERNNKQTCVKVFAELSNSAKNTTPAPIASFITKLLISFPPNQKTIVHPGIFDKPLKHEGFVWAIDSTVTGRFVIEIEFLDLKIADPSGGEPASIWASHQIKKSSDNTALSSLARMLQEGILTDITINATDGSIMAHRAILASRSPVFRSMFSHDLKEKELSTVDISDMSLEACQAFLNYIYGDLRSEEFLTHRLALLRAADKYDISDLKEACHESLLEDIDTKNVLERLQMAHLYRLQKLKDGCLRFLVDFRKVYEMHDDFKVFLQTADRDIIAEIFQGILTTWSGR

SEQ ID NO: 513 - DNA, 993 bp, Panicum virgatum
atgaccgacggcgcgcgcgtggaggcggcgcccaggctcgcgcaatggcgcgtcgacgcgctcccctgctacacctaccgcaagtcgctccccttccgcatcggtctctggaactggtacctatctgtggagagaaacaacaagcaaacttgtgttaagctctttgcagagaattcaaattctacaaagaacggcccctcagccccaatagcttcctttgtcaccaaacttctcatatctcttccacctaatcagcaaaccatagttcacccaggaattttcgacaagcagctgaaacacgacggttttgtgtgggcgattgatagtaccgttacagggagatttgtgattgagatagagtttcttgacctgaaggttactgatccatctggaggtgaaccggcctcaatctgggcctcccaccagatcaagcactcttcagacaacatcgcactgtctgccctgtctcggatgctgcacgaggacatcctcaccgacatcacaatcaacgccgcagacggcagcgtgcgtgcccaccgcgccatcctggcgtcgcgttcccccgtcttccggagcatgttctcgcacgacctcagggagaaggagctctccactgtggacatctccgacatgtccctggaggcatgccatgccttcctccattacatctacggcgacctgcgcagcgaggagttcctcgcgaaccggctggcgctcctccgggcggccgacaagtacgacatggctgacctgaaggaggcctgccacgagagcctgctggaggacatcgacacgggcaacgtgctggagcggctccagaccgcgcacctgtaccggctgccgaggctcaagggtggctgcctgaggttcctggtggacttcaggaaggtgtacgagatgcacgacgacatcaacgtgttcctgcagacggcggagcgggacctcgtggccgaggtgttccatggcgtccttgcagcgtggaacgggcggtaa

SEQ ID NO: 514 - protein, 330 aa, Panicum virgatum
MTDGARVEAAPRLAQWRVDALPCYTYRKSLPFRIGLWNWYLSVERNNKQTCVKLFAENSNSTKNGPSAPIASFVTKLLISLPPNQQTIVHPGIFDKQLKHDGFVWAIDSTVTGRFVIEIEFLDLKVTDPSGGEPASIWASHQIKHSSDNIALSALSRMLHEDILTDITINAADGSVRAHRAILASRSPVFRSMFSHDLREKELSTVDISDMSLEACHAFLHYIYGDLRSEEFLANRLALLRAADKYDMADLKEACHESLLEDIDTGNVLERLQTAHLYRLPRLKGGCLRFLVDFRKVYEMHDDINVFLQTAERDLVAEVFHGVLAAWNGR

SEQ ID NO: 515 - DNA, 993 bp, Sorghum bicolor
atgaccgacggcgcgcgcgtcgaggcggcgcccaggctcgcgcaatggcgcgtcgaggcgctcccctgctacacctatcgcaagtcactccccttccgcatcggcctctggaactggtacctgtctgtggagagaaataacaagcaaacttgtgttaagctctttgcagagaatccaaattctcccaagaacggcccctcagccccaatagcttcctttatcaccaaacttctcatatctcttccacctaatcaacagaccatagtccacccagggattttcgacaaacagctgaaacacgacggttttgtgtgggcaatcgatagcactgtgacagggagatttgtgattgagatagagtttcttgacctgaaggtcgctgatccatctggtggcgaaccagcctcaatctgggcctcccgccagatcaagcagtgttcagacagcaccgctctgtcctccctggctcggatgctgcacgaggacatcctcaccgacatcaccatcaacgcggcggacggcagcgtgcgtgcgcaccgcgccatcctggcgacgcggtcgccggtgttccggagcatgttctcgcacgacctcagggagaaggagctctccaccgtggacatctccgacatgtccctggacgcgtgccgcgccttcctcagctacatctacggcgacgtgagcggcgaggagttcctggcgaaccggctggcgctgctccgtgccgccgacaagtacgacatcgacgacctcagggaggcctgccacgagagcctgctggaggacatcaacatgggcaacgtgctggagcggctgcagacggcgcacctgtaccagctgcccaggctcaagggcggctgccttaggttcctggtggacttcaggaaggtgtacgagatgcacgacgacctcaacgcgttcctgcagacggccgacagggacctcgtggccgaggtgttccatggcgtccttgctgcgtggagcggccggtga

SEQ ID NO: 516 - protein, 330 aa, Sorghum bicolor
MTDGARVEAAPRLAQWRVEALPCYTYRKSLPFRIGLWNWYLSVERNNKQTCVKLFAENPNSPKNGPSAPIASFITKLLISLPPNQQTIVHPGIFDKQLKHDGFVWAIDSTVTGRFVIEIEFLDLKVADPSGGEPASIWASRQIKQCSDSTALSSLARMLHEDILTDITINAADGSVRAHRAILATRSPVFRSMFSHDLREKELSTVDISDMSLDACRAFLSYIYGDVSGEEFLANRLALLRAADKYDIDDLREACHESLLEDINMGNVLERLQTAHLYQLPRLKGGCLRFLVDFRKVYEMHDDLNAFLQTADRDLVAEVFHGVLAAWSGR

SEQ ID NO: 517 - DNA, 993 bp, Medicago trunatula
atgactgattctctttacaaagttgatacaactccacgtcttgctcaatggagaatcgataacttggcttcttgtacttatcgcaaatctgatcctttcaagattggtatctggaattggtatttgtctgtggagaagcacaaggttgtgtttgttaaattgtttcctgaaatatccaatgttacaagagataatcctccaattgcttcttttatcatgcgtgtcgttagttctgctcatggaaatcgaaaagctctcacacatccagagataaaagacaaagtgatcaagagcaatgaagattttgtttggtcaattgaggttccactgtctggaaaattcatcattgatgttgatttccttgatttgaagattgcaggcccagatggtggagaaccttgctccatatggggtggtgaaggatttactcaggagagatcgaacgcaaaagccctaggatctcttggtagaatgctaagagaaggcattcacacagacatcaccattaatgcttctgatggaagtataggagttcatagagctcttctagctgcccgttcacctgtcttccaaagcatgttttcacacgatcttaaagagaaagagttgtcaaccataaacatcacagacatgtcgattgaagtatgtcaggcttttctcaattatctttacgggatcatcaaaaatgaagaatttcttacacataggctagcacttctgcatgcagcggacaagtacgacatatctgacttgagagaggccattcatgagagtcttctagaagatattgatacgaaaaatgtacttgagaggcttcaaaatgcatcactatatcggttgacgaaactgaagatgcattgtatccagtatcttgttaaatttggtaaaatatttgaaattcgggatgatttcaatttgttcctccaaaatgccgacagggatctcatcgctgaagtctttggggaagttcttggtgcctggaaaggatattga

SEQ ID NO: 518 - protein, 330 aa, Medicago trunatula
MTDSLYKVDTTPRLAQWRIDNLASCTYRKSDPFKIGIWNWYLSVEKHKVVFVKLFPEISNVTRDNPPIASFIMRVVSSAHGNRKALTHPEIKDKVIKSNEDFVWSIEVPLSGKFIIDVDFLDLKIAGPDGGEPCSIWGGEGFTQERSNAKALGSLGRMLREGIHTDITINASDGSIGVHRALLAARSPVFQSMFSHDLKEKELSTINITDMSIEVCQAFLNYLYGIIKNEEFLTHRLALLHAADKYDISDLREAIHESLLEDIDTKNVLERLQNASLYRLTKLKMHCIQYLVKFGKIFEIRDDFNLFLQNADRDLIAEVFGEVLGAWKGY

SEQ ID NO: 519 - DNA, 993 bp, Populus trichocarpa
atgacagattcttctgcttatagagttgaaaccacttctcgtcttgctcaatggaagatagacaatcttgcttcttgtacttatcggaaatcagatcctttcaagattggcaagtggaattggcatctatctgtggagaagaaccgggtattatttgttaagttgtatccagagatatcgaatctaacgcgggaaaatcctccaattgcttcatttattattcgagttgtttcttctgctggagatcgcaaggctttgactcatccagaggtaacagataagcagctcaagaacaacgaggatttcgtctgggcaattgatgttcctttaacaacagggaaattcattatcgacgttgaattccttgatttgaaggcagcatctccagggggtggagaaccttgctcgatctgggacgaagaaaccacagaaaagcgagcaaatgcaacagctcttgtgtcacttggtagaatgttaacagaaagcatccacacggatatcaaaattattgtttctgatggaagcattggagcccaccgtgctgttcttgctgcaagatcgcctgttttccacagcatgtttgctcatgacctgaaagaaaaggaactgtcaaccataaatatctccgacatgtcaattgaagcttgtcaggcttttctcaattacatatatgggaacatccagagtgaagaatttcttgtccaccgtttggcacttctcagtgcagctgataagtatgatattgctgacctgaaagaggcatgtcatgacagtcttctggaagatatagacacaaagaatgtacttgagaggctacaaagcgcatccttgtatcaattgccgaaactgaagaccagctgcctgcggtatcttgtgaagttcggtaagatatttgatattcgagatgatttcaattccttcttgcaatgtgcagacagggatctgatagctgaagtctttcatgaagttctcaattcctggaaaggattctga

SEQ ID NO: 520 - protein, 330 aa, Populus trichocarpa
MTDSSAYRVETTSRLAQWKIDNLASCTYRKSDPFKIGKWNWHLSVEKNRVLFVKLYPEISNLTRENPPIASFIIRVVSSAGDRKALTHPEVTDKQLKNNEDFVWAIDVPLTTGKFIIDVEFLDLKAASPGGGEPCSIWDEETTEKRANATALVSLGRMLTESIHTDIKIIVSDGSIGAHRAVLAARSPVFHSMFAHDLKEKELSTINISDMSIEACQAFLNYIYGNIQSEEFLVHRLALLSAADKYDIADLKEACHDSLLEDIDTKNVLERLQSASLYQLPKLKTSCLRYLVKFGKIFDIRDDFNSFLQCADRDLIAEVFHEVLNSWKGF

SEQ ID NO: 521 - DNA, 993 bp, Oryza sativa
atgagcgacggggcgcgcgtggaggcggcgccgcggctcgcgcaatggcgcgtcgacgtgctcccctgctacacctaccgcaagtccgagcccttccgcatcggcctctggaactggtacctatctgtggagagaaataacaagcaaacttgtgttaaggtctttgcggagttatcgaattctgccaagaatacaaccccagcccctattgcttccttcatcacaaaacttctcatatcttttcctccaaatcagaggaccatagttcatccaggaatttttgacaagccgctgaaacacgaaggttttgtgtgggcaattgatagtactgttacaggaagatttgtgattgagatagagtttcttgacctgaaaattgcagatccatctggtggtgaaccagcctcaatttgggcttcccaccaaatcaagaaatcttcagacaacactgcactgtcatccttggcgagaatgctgcaagaaggcatcctcaccgacatcacaatcaacgctaccgacggcagcattatggcccaccgtgcaatcctggccagccgttcccctgtcttcaggagcatgttctcgcacgacctcaaggagaaagaactctcaacagttgacatctctgacatgtcccttgaagcatgccaggccttcctcaactacatttatggtgacctacgcagcgaagagttcctcacccacaggttagctcttctcagagctgccgataagtatgacatctctgatcttaaggaggcatgccatgagagcctgttagaggacatcgacacgaagaatgtgctcgagaggcttcagatggcgcacttgtaccgattgcaaaagctcaaggatggctgcttgagatttctggtagatttcaggaaggtgtatgaaatgcatgacgatttcaaggtgttcctccagacagcagacagggatatcatagctgaaatcttccaaggtattcttacaacatggagtgggcgataa

SEQ ID NO: 522 - protein, 330 aa, Oryza sativa
MSDGARVEAAPRLAQWRVDVLPCYTYRKSEPFRIGLWNWYLSVERNNKQTCVKVFAELSNSAKNTTPAPIASFITKLLISFPPNQRTIVHPGIFDKPLKHEGFVWAIDSTVTGRFVIEIEFLDLKIADPSGGEPASIWASHQIKKSSDNTALSSLARMLQEGILTDITINATDGSIMAHRAILASRSPVFRSMFSHDLKEKELSTVDISDMSLEACQAFLNYIYGDLRSEEFLTHRLALLRAADKYDISDLKEACHESLLEDIDTKNVLERLQMAHLYRLQKLKDGCLRFLVDFRKVYEMHDDFKVFLQTADRDIIAEIFQGILTTWSGR

SEQ ID NO: 523 - DNA, 996 bp, Triticum aestivum
atgagcgccgcggggtcccgggtcgaggcggcgccgcggctcgcgcaatggcgcgtcgacgccctcccctgctacacctaccgcaagtccgactccttccgcgtcggcctctggaactggtacctgtctgtggagagaaacaacaagcaaacttgcgttaagctctttgcagagttgtcaaattctgccaagaacacagcccccgcaccgatagcctcgtttgtcacgaaacttctgatatcctttcctccagatcagaagatcatagagcatccaggtatcctggacaagcctctgaaacacgaagggcttgtgtggacgattgatagtagttttacaggaagatttgtgattgagatagagtttctggacctcaaagttgcagattcatctggaggtgaacctgcctcgatctgggcctcacgccaaatcaagcagtcttcagacaacaccgcgctgtcatcccttgcaaaaaaaaagcaagaaggcatcctctgcgacatcaccatcaacgccgacgatggcagcatcaaggcccaccgcgccatcctggccgcccgctcgcccgtcttcaggagcatgttcacgcacgacctcagggagaaggagctctccacggtggacatctccgacatgtccctcgacgcgtgccggggcttcctcaactacatctacggcaacctgcgcagcgaggagttcctcgcgcaccggctggccctcctcggcgccgccgacaagtacgacatcgccgacctcaaggaggcgtgcctcgagagcctgctggaggacatcgacgcccggaacgtgatcgaacggctacagacgggccacctgtaccggctgcagaggctcaaggacagctgcatcaggttcctcgtcgacttcaggaaggtgtacgagatgcaggaggagttcagcgccttccttcagacggcggacagggacctggtggctgaagtgtttcagggcgttcttgcggcgtggagcggccggtga

SEQ ID NO: 524 - protein, 331 aa, Triticum aestivum
MSAAGSRVEAAPRLAQWRVDALPCYTYRKSDSFRVGLWNWYLSVERNNKQTCVKLFAELSNSAKNTAPAPIASFVTKLLISFPPDQKIIEHPGILDKPLKHEGLVWTIDSSFTGRFVIEIEFLDLKVADSSGGEPASIWASRQIKQSSDNTALSSLAKKKQEGILCDITINADDGSIKAHRAILAARSPVFRSMFTHDLREKELSTVDISDMSLDACRGFLNYIYGNLRSEEFLAHRLALLGAADKYDIADLKEACLESLLEDIDARNVIERLQTGHLYRLQRLKDSCIRFLVDFRKVYEMQEEFSAFLQTADRDLVAEVFQGVLAAWSGR

SEQ ID NO: 525 - DNA, 996 bp, Triticum aestivum
atgagcgccgcggggtcccgggtcgagccctcgccgcggctcgcgcaatggcgcgtcgacgccctcccctgctacacctaccgcaagtccgactccttccgcgtcggcctctggaactggtacctgtctgtggagagaaacaacaagcaaacttgcgttaagctctttgcagagttgtcaaattctgccaagaacacagcccccgcaccgatagcctcgtttgtcacgaaacttctgatatcctttcctccagatcagaagatcatagagcatccaggtatcctggacaagcctctgaaacacgaagggtttgtgtggacgattgatagtagttttacaggaagatttgtgattgagatagagtttctggacctcaaagttgcagattcatctggaggtgaacctgcctcgatctgggcctcacgccaaatcaagcagtcttcagacaacaccgcgctgtcatcccttgcaaggatgctgcaagaaggcatcctctgcgacatcacgatcaacgccgacgatggcagcatcagggcgcaccgggcgatcctggccgcccgctcgcccgtctttcggagcatgttctcgcacgacctcagggagaaggagctctccacggtggacatctccgacatgtccctcgacgcgtgccggggcttcctcaactacatctacggcaacctgcgcagcgaggagttcctcgcgcaccggctggccctcctcggcgccgccgacaagtacgacatcgccgacctcaaggaggcgtgcgtcgagagcctgctggaggacatcgacgcccggaacgtgatcgaacggctacagacgggccacctgtaccggctgcagaggctcaaggacagctgcctcaggttcctggtcgacttcaggaaggtgtacgagatgcaggaggagttcagcgcgttccttcagacggcggacagggacctggtggctgaggtgtttcagggcgttcttgcggcgtggagcggccggtga

SEQ ID NO: 526 - protein, 331 aa, Triticum aestivum
MSAAGSRVEPSPRLAQWRVDALPCYTYRKSDSFRVGLWNWYLSVERNNKQTCVKLFAELSNSAKNTAPAPIASFVTKLLISFPPDQKIIEHPGILDKPLKHEGFVWTIDSSFTGRFVIEIEFLDLKVADSSGGEPASIWASRQIKQSSDNTALSSLARMLQEGILCDITINADDGSIRAHRAILAARSPVFRSMFSHDLREKELSTVDISDMSLDACRGFLNYIYGNLRSEEFLAHRLALLGAADKYDIADLKEACVESLLEDIDARNVIERLQTGHLYRLQRLKDSCLRFLVDFRKVYEMQEEFSAFLQTADRDLVAEVFQGVLAAWSGR

SEQ ID NO: 527 - DNA, 996 bp, Triticum aestivum
atgagcgccgcggggtcccgggtcgaggcggcgccgcggctcgcgcaatggcgcgtcgacgcgctcccctgctacacctaccgcaagtccgactccttccgcgtcggcctctggaactggtacctgtctgtggagagaaacaacaagcaaacttgcgttaagctctttgcagagttgtcaaattccgccaagaacacagccccggcaccgatagcctcctttgtcacaaaacttctgatatcctttcctccaaatcagaagatcatagagcatccaggtatcttggacaagcatctgaagcacgaagggtttgtgtggacgattgatagtagttttacaggaagatttgtgattgagatagagtttctggacctgaaagttgcagactcatctggtggtgaacctgcctcgatctgggcctcacaccaaatcaagcagtcctcagacaacaccgcgctgtcatccctcgcaaggatgctgcaagagggcatcctctgcgacatcacgatcaacgccgacgacggcagcatcagggcgcaccgggcgatcctggccgcccgctcgcccgtcttcaggagcatgttctcgcacgacctcagggagaaggagctctccacggtcgacatctccgacatgtccctcgacgcgtgccggggcttcctcaactacatctacggcgacctgcacagcgaggagttcctcgcgcaccggctggccctcctcggcgccgccgacaagtacgacatcgccgacctcaaggaggcgtgcctcgagagcctgctggaggacatcgacgcccggaacgtgatcgaacggctccagacgggccatctgtaccggctgcagaggctcaaggacagctgcatcaggttcctcgtggacttcaggaaggtgtacgagatgcaggaggagttcagcgccttccttcagacggcggacagggacctggtggctgaagtgtttcagggcgttcttgcggcgtggagtggccggtga

SEQ ID NO: 528 - protein, 331 aa, Triticum aestivum
MSAAGSRVEAAPRLAQWRVDALPCYTYRKSDSFRVGLWNWYLSVERNNKQTCVKLFAELSNSAKNTAPAPIASFVTKLLISFPPNQKIIEHPGILDKHLKHEGFVWTIDSSFTGRFVIEIEFLDLKVADSSGGEPASIWASHQIKQSSDNTALSSLARMLQEGILCDITINADDGSIRAHRAILAARSPVFRSMFSHDLREKELSTVDISDMSLDACRGFLNYIYGDLHSEEFLAHRLALLGAADKYDIADLKEACLESLLEDIDARNVIERLQTGHLYRLQRLKDSCIRFLVDFRKVYEMQEEFSAFLQTADRDLVAEVFQGVLAAWSGR

SEQ ID NO: 529 - DNA, 999 bp, Zea mays
atgaccgacggcgcgcgcgtcgagacggcgcccaggctcgcccaatggcgcgtcgacccgctcccctgctacacctaccgcaagtcactccccttcctcatcggcctctggaactggtgcatatctgtggagagaaataacaagcaaacctgtgttaagctctttgcagagaatacaagttctctcaagaacggttcctcagccccaatagcttcctttatcgccaaacttattgtatctcttccacctaatcagcagaccatagtccacccaggaatttttgacaaacagctgaaatacgacggttttgtgtggacaatcgatagcaccgtcactgggaggtttgtgattgagatagagtttcttgacctgaaggtcgctgatccgtctggcggggagccggcctcgatttgggcctcccgccaggtcaagcagtgctcggacagcacggccctgtcgtccctggctcggatgctgcacgaggacgtcctcaccgacatcaccatcaacgcggcggacggcagcgtgggcgcgcaccgcgcggtcctggcgacgcggtcgccggtgttccggagcatgttctcgcacgacctgagggagaaggagctctccaccgtggacatcaccgacatgtccctggacgcgtgccgcgccttcctcagctacatctacggcgacgtgcgcggcggcgaggagttcctggcgaaccggctggcgctcctccgcgccgccgacaagtacgacatcggcgacctcagggaggcctgccacgagagcctgctggaagacatcgacgcgcgcaacgtgctggagcggctgcagacggcgcacctgtaccggctgccgaggctcaagggcggctgcctgaggttccttgtggacttcaggaaggtgtacgagatgcacgacgacgacctcaacgcgttcctgcagacggccgacagggaactcgtggccgaggtgttccatggcgttcttgccgcgtggagcgggcggtaa

SEQ ID NO: 530 - protein, 332 aa, Zea mays
MTDGARVETAPRLAQWRVDPLPCYTYRKSLPFLIGLWNWCISVERNNKQTCVKLFAENTSSLKNGSSAPIASFIAKLIVSLPPNQQTIVHPGIFDKQLKYDGFVWTIDSTVTGRFVIEIEFLDLKVADPSGGEPASIWASRQVKQCSDSTALSSLARMLHEDVLTDITINAADGSVGAHRAVLATRSPVFRSMFSHDLREKELSTVDITDMSLDACRAFLSYIYGDVRGGEEFLANRLALLRAADKYDIGDLREACHESLLEDIDARNVLERLQTAHLYRLPRLKGGCLRFLVDFRKVYEMHDDDLNAFLQTADRELVAEVFHGVLAAWSGR

SEQ ID NO: 531 - DNA, 1005 bp, Panicum virgatum
atgagcctcagcagcggcgccgcgccggactcccgcgtggagaccatctcccggctggcgcagtggcgcatcgacaccctgggcccctgctgcttccgccgctccgaccccttcaagctcggcatctggaactggtacctgtcggtcgagaagacccgctccctgtgcatccgcctcttcccggagcccggccgggtggccaaggagcagccccctctcgcgcgcttcctgctccgcgtctcctggcccggcccgccgcgccgctcctgcgcatcccctgtgcaagagcagcttctccgaaccagtgatgactttgtatggcaagttgatgccatgtcccatgggcgtttcacaatcgatgttgagtttctagacctgaggatagccactaacaatgctaccgaatcatcttcatcgatctggccgaatgaaggaatggtgcagagaattgctggtaacagcactctgggatgcctttcccgcatgctgacagagtcaatccacacggacgtgaccatcaacacgactgatggcgtcctcaaggcccacaaggctgtgctggcagcttgctctcccgtgtttgagagcatgttcgtgcacgacctcaaggagaaggagtcgtccacggtgaacatcaacgacatgtgcctggagtcgtgctcggcgcttctaggcttcatctacgggacgatcaagcaggaacagttctggaagcaccggctgtcgctgctggcagcggcgaacaagtacggcatcggcgacatcaaggactgctgcgaggagagcctgctggaggacatcaactcgagcaacgtcctggagcggctccacgtggcgtggctgtaccagctggggaggctgaagaaagggtgcctcagctacctgtttgtgtttgggaagatttacgacgtgagggatgagatccatagcttcttccaccacgccgaccgcgagctgatggtggagatgttccaggaggtgctcagtgtctggaagcccatatga

SEQ ID NO: 532 - protein, 334 aa, Panicum virgatum
MSLSSGAAPDSRVETISRLAQWRIDTLGPCCFRRSDPFKLGIWNWYLSVEKTRSLCIRLFPEPGRVAKEQPPLARFLLRVSWPGPPRRSCASPVQEQLLRTSDDFVWQVDAMSHGRFTIDVEFLDLRIATNNATESSSSIWPNEGMVQRIAGNSTLGCLSRMLTESIHTDVTINTTDGVLKAHKAVLAACSPVFESMFVHDLKEKESSTVNINDMCLESCSALLGFIYGTIKQEQFWKHRLSLLAAANKYGIGDIKDCCEESLLEDINSSNVLERLHVAWLYQLGRLKKGCLSYLFVFGKIYDVRDEIHSFFHHADRELMVEMFQEVLSVWKPI

SEQ ID NO: 533 - DNA, 1011 bp, Sorghum bicolor
atgaacggcggcgggtccggaggggcgagcgggccggactcccgcgtggagaccatctcccgcctggcgcagtggcgcatcgacaccttcggcccctgctcctaccgccgctccgaccccttcaagctcggcatctggaactggtacctgtcggtggagaagagccgctccatcttcgtgcgcctcttcccggagcccggccgggtggccaaggagcagccccctctcgcgcgcttcctgctccgcgtctcctgggccggcccgccgcgacgcacctgcgtctcccctgtgcacgaacatcttctgcgtaccagtgatgactttgtctggcaagttgatgcaatgtcccatgggcgttttacgattgatgttgagtttctggacctgaggatagccaataacaatgctactgaatcattgtcggtatggccaaccgaaggcatggtgcagaagattgcgagcaagagcaccctcgggtgtctctcccgcatgctgacggattccatccacacagacgtgaccatcaacacgacggacggcgtcctgaaggcccacaaggcggtgctggcggcgtgctcccccgtgttcgaaagcatgttcatgcacgacctgagggagaaggagtcgtccacaatcaacatcagcgacatgtgcctggagtcgtgctcggcgctgctgggcttcatctatgggacgatcgagcaggggcagttctggaagcaccggctgccactgctggcggcggccaacaagtacgggattggcgacatcaaggactgctgcgaggagagcctgctggaggatattacctcggcgaacgtccttgagcggctccacgtggcgtggctgtaccagctggagcggctcaagaaagggtgcctcacctacctgtttgtgtttgggaagatttatgatgtgagggacgagatgcacagcttcttccaccacgcggaccgcgagctcatgctcgagatgttccaggaggtcctcagcgtgtggaagcccatgtga

SEQ ID NO: 534 - protein, 336 aa, Sorghum bicolor
MNGGGSGGASGPDSRVETISRLAQWRIDTFGPCSYRRSDPFKLGIWNWYLSVEKSRSIFVRLFPEPGRVAKEQPPLARFLLRVSWAGPPRRTCVSPVHEHLLRTSDDFVWQVDAMSHGRFTIDVEFLDLRIANNNATESLSVWPTEGMVQKIASKSTLGCLSRMLTDSIHTDVTINTTDGVLKAHKAVLAACSPVFESMFMHDLREKESSTINISDMCLESCSALLGFIYGTIEQGQFWKHRLPLLAAANKYGIGDIKDCCEESLLEDITSANVLERLHVAWLYQLERLKKGCLTYLFVFGKIYDVRDEMHSFFHHADRELMLEMFQEVLSVWKPM

SEQ ID NO: 535 - DNA, 1011 bp, Zea mays
atgagcggcggcgggcccggaggtgcgtgcgggccggactcccgcgtggagaccatctcccggctggcgcagtggcgcatcgataccttcggcccctgctcctaccgccggtcggacccctttaagctcggcatctggaactggtacctgtcggtggagaagagccgctccatcgttgtgcgcctcttcccggagcccggccgggtggccaaggagcagccccctctcgcgcgcttcctgctccgcgtctcctgggccggcccgccgcgacgctcctgcgtctcccctgtgcacgagcatcttctgcgtaccagcgatgattttgtatggcaagtcgatgcgatgtcccatgggcgttttacgattgatgttgagtttctagacctgaggatagccacgaacaatgctacggaatcgtcatcggtgtggccaaacgaaggcatggtgcagaagatcgcgagcaagagcgccctgggctgcctgtcgcgcatgctggcggactccatccacgcggacgtgaccatcaacacgacggacggggtgctgaaggcgcacaaggcggtgctggcggcgtgctcccccgtgttcaagagcatgttcgtgcacgacctgagggagaaggagtcgtcgacggtggacatcggcgacatgtgcgtggagtcgtgctcggcgctgctgggcttcgtgtacgggacgatcgagcagggacagttctggaagcaccggctgccgctgctggcggcggcggacaagtacgggatcggcgacatcaaggactgctgcgaggagagcctgctggaggacataggctcgggcaacgtgctggagcggctccacgtggcgtggctgtaccggctggagcggctgaagaaagggtgcctcacctacctgttcgtgttcgggaagatctatgacgtgagggacgagatgcacggcttcttccaccacgcggaccgcgagctcatgcacgacatgttccaggaggtgctcagcgtgtggaagcccatgtga

SEQ ID NO: 536 - protein, 336 aa, Zea mays
MSGGGPGGACGPDSRVETISRLAQWRIDTFGPCSYRRSDPFKLGIWNWYLSVEKSRSIVVRLFPEPGRVAKEQPPLARFLLRVSWAGPPRRSCVSPVHEHLLRTSDDFVWQVDAMSHGRFTIDVEFLDLRIATNNATESSSVWPNEGMVQKIASKSALGCLSRMLADSIHADVTINTTDGVLKAHKAVLAACSPVFKSMFVHDLREKESSTVDIGDMCVESCSALLGFVYGTIEQGQFWKHRLPLLAAADKYGIGDIKDCCEESLLEDIGSGNVLERLHVAWLYRLERLKKGCLTYLFVFGKIYDVRDEMHGFFHHADRELMHDMFQEVLSVWKPM

SEQ ID NO: 537 - DNA, 1011 bp, Aquilegia sp.
atgaccagcagcagcagcagtagtagtggtgttggagattcgaaagtggagacaatatcaagactagcacaatggagaatagacagttttggtccttgttcttatcgtcgttctgatcctttcaaggtcggcatttggaactggcacttatcagtggagaagaatcggtatttatatgttcgtttgtttccagaaccatctaaactatgcaaagatcaaccccccatagctagatttgtgctcagagtctccaatattggcaccaatcgacgcccttatatttctcccattcatgagagattgctaagaaccagtgaagactttaattggcctgttgattgcgcatttcatggtcgttttatcattgatgttgagtttttggatctcaaaatctgcccagtaaatggcgtggaagccagctcgatctggcctagtgaaggatttgtgaacactctgtcatcccaaggttctcttagatgcctatctcggatgcttgatgagggtattcatgctgatgtcaccattaacgcagctgatggcacactgcgagcgcacaaggcaatactatctgctagttcttctgtgtttcacagtatgttcttacacgacctgaaggagaaagaatcatccacaattgatatagatgacatgtcaatggagtcgtgcactgcccttctcagttatatatatgggaccattaaacaaatagatttttggaagcatcggttggcacttcttggtgcagcaaacaagtatgacatcacacttttgaaagacgcctgtgaggaaagcctcctagaggatatcaactctggcaatgtccttgagaggctgcaggaggcatggttgtaccagttggaagggcttaagaaagggtgcttgatgtacttgtttgactttggcaagatctatgatgtcagagatgaaatcaataacttcttcaggaatgctgatagagaattaatggtggaaatgtttcaggaagtgctcacagtctggaagcccgcataa

SEQ ID NO: 538 - protein, 336 aa, Aquilegia sp.
MTSSSSSSSGVGDSKVETISRLAQWRIDSFGPCSYRRSDPFKVGIWNWHLSVEKNRYLYVRLFPEPSKLCKDQPPIARFVLRVSNIGTNRRPYISPIHERLLRTSEDFNWPVDCAFHGRFIIDVEFLDLKICPVNGVEASSIWPSEGFVNTLSSQGSLRCLSRMLDEGIHADVTINAADGTLRAHKAILSASSSVFHSMFLHDLKEKESSTIDIDDMSMESCTALLSYIYGTIKQIDFWKHRLALLGAANKYDITLLKDACEESLLEDINSGNVLERLQEAWLYQLEGLKKGCLMYLFDFGKIYDVRDEINNFFRNADRELMVEMFQEVLTVWKPA

SEQ ID NO: 539 - DNA, 1014 bp, Lactuca sativa
atgaggaatatgcagagagctcttgattcggggatggttgataccaaggtagagaccatatccaggttggctcaatggaggatcgacaattttggaccttgtacttacaaaagatcagaacctttcaaaatcggcatatggaattggcaaatatcagtcgagaagaatcgacatctttacgttcgtctgtttccagagccgtctcgcctatcgaaagaacagccgccgattgccaaattcataattcgagttaccaccgcgggatccaatcgcagaccatacatctcaccaattcatgagagacttcttcggacaagtgaagactttgtgtggcctgttgattctactttccatggtcgattcatcatagatgtcgagttcttggaccttcaggtttattcggctaatggagaggaagcaagttcgatatggcctcgggacacgacgctgcggtcatcagcaacggacagcattctgcgttgcctttcccggatgctccgggagtccatcgatgctgacgtgaccatcaacacgtgtgatgggagtttaaaagcccacaaagccatactttctgccagctcacccgtcttccacagcatgttcctccacaacctccaggaaaaagaatcctccaccattaacatccaggacatgtccttggagtcttgcactgcgcttctgtcttacttgtatggaagcatcaagcaggaggagttctggcgccaccgggtcccactcctgagtgcggccaataagtatgggattgggaatttgaaggatttgtgtgaggagagtttgctggaggatataaactcagggaatgtgctcgagaggttgcaggaggcctggctttaccagcttgacaaactcaagaaagggtgtttgacgtatttgtttgattttgggaagatttatgatatcaaagatgagattaatatcttttttaggactgctgagagggaactcatacaggaaatgtttcaggaggtgcttacggtttggaaacccgcctga

SEQ ID NO: 540 - protein, 337 aa, Lactuca sativa
MRNMQRALDSGMVDTKVETISRLAQWRIDNFGPCTYKRSEPFKIGIWNWQISVEKNRHLYVRLFPEPSRLSKEQPPIAKFIIRVTTAGSNRRPYISPIHERLLRTSEDFVWPVDSTFHGRFIIDVEFLDLQVYSANGEEASSIWPRDTTLRSSATDSILRCLSRMLRESIDADVTINTCDGSLKAHKAILSASSPVFHSMFLHNLQEKESSTINIQDMSLESCTALLSYLYGSIKQEEFWRHRVPLLSAANKYGIGNLKDLCEESLLEDINSGNVLERLQEAWLYQLDKLKKGCLTYLFDFGKIYDIKDEINIFFRTAERELIQEMFQEVLTVWKPA

SEQ ID NO: 541 - DNA, 1149 bp, Oryza sativa
atgttaccgggagttattacaagtagagtgagaggagacggcgcggcggcggcggcggcggcgggatggagagggagaaccgggtggagaccatctcccggctggcccagtggcgcatcgacaccttcggcccctcctcctaccgccgctccgattccttcaagatcggcatctggaactggttcccttcccaatcccaatcccccactactcagagatcaccgatttgccctatcaaatcaaatcatccgccaattcgatccgaatccgtgcaggtacctatcggtggagaaggctcgatatgtatacgtgaggctgttcccggagcccgggcgggtggccaaggaacggcccccgctcgcccgcttccttctccgagcttgctggtccggcccgccacgccgctcctgcgtctcccctgtgcatgagcatctcctccgaagcagcgaagactttttctggcaacttgatacgatgtacgctgggcgtttcactattgatgttgagtttttggacctgaagatagcctctaacaatgctgcagaatcatctacctcgatttggccaaatgaaagcatagcggtgcagaacattgctagtaagagcagtctcggatgcctttcgcgcatgctcacggagtcgatacatgcagacgtcaccataaatacgactgatggtgtcctcaaggcccataaggccatccttgcatcatgttctcctgtgtttgaaagcatgttcctccatgatctcaaggaaaaggagtcctccacaatcaacataaatgacatgtgccttgagtcttgctctgctctgattggcttcatctacgggaccataaagctagaccagttctggaagcaccgcctctcgctgctcgccgcagcgaacaagtacagcatttctgatatcaaggactgctgcgaggagagcctcctggaggatataaactctagcaatgtcctcgagaggcttcacgtcgcgtggctgtaccagctgcaaaagctgaagaaagggtgcctgacctacctgtttgtttttgggaagatatacgatgtgagggaggagatcaatagcttcttccagcacgcagatcgtgagctgatgctggaaatgttccaagaggtcataactgcgtggaagcccatatga

SEQ ID NO: 542 - protein, 382 aa, Oryza sativa
MLPGVITSRVRGDGAAAAAAAGWRGRTGWRPSPGWPSGASTPSAPPPTAAPIPSRSASGTGSLPNPNPPLLRDHRFALSNQIIRQFDPNPCRYLSVEKARYVYVRLFPEPGRVAKERPPLARFLLRACWSGPPRRSCVSPVHEHLLRSSEDFFWQLDTMYAGRFTIDVEFLDLKIASNNAAESSTSIWPNESIAVQNIASKSSLGCLSRMLTESIHADVTINTTDGVLKAHKAILASCSPVFESMFLHDLKEKESSTININDMCLESCSALIGFIYGTIKLDQFWKHRLSLLAAANKYSISDIKDCCEESLLEDINSSNVLERLHVAWLYQLQKLKKGCLTYLFVFGKIYDVREEINSFFQHADRELMLEMFQEVITAWKPI

SEQ ID NO: 543 - protein, 50 aa, Artificial sequence
  motif 7
  VARIANT (3)..(3): / replace = "Lys"
  VARIANT (5)..(5): / replace = "Ile"
  VARIANT (7)..(7): / replace = "Ser"
  VARIANT (9)..(9): / replace = "Thr" / replace = "Ser"
  VARIANT (14)..(14): / replace = "Glu" / replace = "His"
  VARIANT (18)..(18): / replace = "Leu"
  VARIANT (20)..(20): / replace = "Asn"
  VARIANT (22)..(22): / replace = "Arg"
  VARIANT (26)..(26): / replace = "Leu"
  VARIANT (28)..(28): / replace = "Thr"
  VARIANT (29)..(29): / replace = "Val"
  VARIANT (30)..(30): / replace = "Asp" / replace = "His"
  VARIANT (32)..(32): / replace = "Glu"
  VARIANT (36)..(36): / replace = "Leu"
  VARIANT (38)..(38): / replace = "Ala"
  VARIANT (40)..(40): / replace = "Thr" / replace = "Met"
  VARIANT (42)..(42): / replace = "Phe"
  VARIANT (44)..(44): / replace = "Asn"
  VARIANT (46)..(46): / replace = "Ile"
  VARIANT (49)..(49): / replace = "Thr"
AHRAVLAARSPVFRSMFSHDLKEKESSIINISDMSTESCQALLSYLYGNI

SEQ ID NO: 544 - protein, 50 aa, Artificial sequence
  motif 8
  VARIANT (1)..(1): / replace = "Glu"
  VARIANT (2)..(2): / replace = "Phe"
  VARIANT (3)..(3): / replace = "Leu"
  VARIANT (11)..(11): / replace = "Arg"
  VARIANT (14)..(14): / replace = "Asn"
  VARIANT (19)..(19): / replace = "Gly"
  VARIANT (23)..(23): / replace = "Asn" / replace = "Asp"
  VARIANT (26)..(26): / replace = "His"
  VARIANT (34)..(34): / replace = "Asn"
  VARIANT (35)..(35): / replace = "Thr"
  VARIANT (36)..(36): / replace = "Gly"
DLWKHRLALLGAADKYDIVDLKEACEESLLEDIDSKNVLERLQEAWLYQL

SEQ ID NO: 545 - protein, 41 aa, Artificial sequence
  motif 9
  VARIANT (1)..(1): / replace = "Arg"
  VARIANT (5)..(5): / replace = "Leu" / replace = "Thr"
  VARIANT (14)..(14): / replace = "Glu"
  VARIANT (16)..(16): / replace = "Phe"
  VARIANT (17)..(17): / replace = "Thr"
  VARIANT (18)..(18): / replace = "Ala" / replace = "Ser"
  VARIANT (19)..(19): / replace = "Cys"
  VARIANT (20)..(20): / replace = "Ser"
  VARIANT (22)..(22): / replace = "Lys"
  VARIANT (23)..(23): / replace = "Arg"
  VARIANT (29)..(29): / replace = "Val"
  VARIANT (31)..(31): / replace = "Leu"
  VARIANT (35)..(35): / replace = "Tyr"
  VARIANT (38)..(38): / replace = "Ile"
  VARIANT (40)..(40): / replace = "Arg"
KVETISRLAQWRIDNLGPSTYRKSDPFKIGIWNWHLSVEKN

SEQ ID NO: 546 - protein, 50 aa, Artificial sequence
  motif 10
  VARIANT (3)..(3): / replace = "Lys"
  VARIANT (5)..(5): / replace = "Ile"
  VARIANT (7)..(7): / replace = "Ser"
  VARIANT (9)..(9): / replace = "Thr" / replace = "Ser"
  VARIANT (14)..(14): / replace = "His"
  VARIANT (18)..(18): / replace = "Leu"
  VARIANT (20)..(20): / replace = "Asn"
  VARIANT (22)..(22): / replace = "Arg"
  VARIANT (26)..(26): / replace = "Ser"
  VARIANT (29)..(29): / replace = "Val"
  VARIANT (30)..(30): / replace = "Asp"
  VARIANT (32)..(32): / replace = "Glu"
  VARIANT (36)..(36): / replace = "Thr" / replace = "Ile"
  VARIANT (37)..(37): / replace = "Asp"
  VARIANT (38)..(38): / replace = "Ser"
  VARIANT (40)..(40): / replace = "Thr"
  VARIANT (42)..(42): / replace = "Phe"
  VARIANT (44)..(44): / replace = "Asn"
  VARIANT (46)..(46): / replace = "Leu"
  VARIANT (49)..(49): / replace = "Thr"
AHRAVLAARSPVFRSMFSHDLKEKELSTINISDMSLEACQALLSYIYGNI

SEQ ID NO: 547 - protein, 50 aa, Artificial sequence
  motif 11
  VARIANT (1)..(1): / replace = "Glu"
  VARIANT (2)..(2): / replace = "Phe"
  VARIANT (3)..(3): / replace = "Trp"
  VARIANT (11)..(11): / replace = "Arg"
  VARIANT (14)..(14): / replace = "Asn"
  VARIANT (19)..(19): / replace = "Gly"
  VARIANT (23)..(23): / replace = "Asn" / replace = "Asp"
  VARIANT (26)..(26): / replace = "His"
  VARIANT (34)..(34): / replace = "Asn"
  VARIANT (35)..(35): / replace = "Thr"
  VARIANT (36)..(36): / replace = "Gly"
  VARIANT (44)..(44): / replace = "Asn"
  VARIANT (49)..(49): / replace = "Arg"
DLLKHRLALLGAADKYDIVDLKEACEESLLEDIDSKNVLERLQEAWLYQL

SEQ ID NO: 548 - protein, 41 aa, Artificial sequence
  motif 12
  VARIANT (1)..(1): / replace = "Lys"
  VARIANT (5)..(5): / replace = "Leu" / replace = "Thr"
  VARIANT (6)..(6): / replace = "Ala" / replace = "Pro"
  VARIANT (12)..(12): / replace = "Lys"
  VARIANT (13)..(13): / replace = "Val"
  VARIANT (14)..(14): / replace = "Glu"
  VARIANT (16)..(16): / replace = "Phe"
  VARIANT (17)..(17): / replace = "Thr" / replace = "Ala"
  VARIANT (18)..(18): / replace = "Ala" / replace = "Pro"
  VARIANT (19)..(19): / replace = "Cys"
  VARIANT (20)..(20): / replace = "Ser"
  VARIANT (22)..(22): / replace = "Lys"
  VARIANT (23)..(23): / replace = "Arg"
  VARIANT (28)..(28): / replace = "Arg"
  VARIANT (29)..(29): / replace = "Val"
  VARIANT (31)..(31): / replace = "Leu"
  VARIANT (35)..(35): / replace = "Tyr"
  VARIANT (38)..(38): / replace = "Ile"
  VARIANT (40)..(40): / replace = "Arg"
RVETISRLAQWRIDNLGSSTYRKSDPFKIGIWNWHLSVEKN

SEQ ID NO: 549 - protein, 50 aa, Artificial sequence
  motif 13
  VARIANT (3)..(3): / replace = "Ile"
  VARIANT (4)..(4): / replace = "Ala"
  VARIANT (10)..(10): / replace = "Lys"
  VARIANT (12)..(12): / replace = "Glu"
  VARIANT (13)..(13): / replace = "Ser"
  VARIANT (14)..(14): / replace = "Leu"
  VARIANT (15)..(15): / replace = "Gly"
  VARIANT (16)..(16): / replace = "Pro"
  VARIANT (17)..(17): / replace = "Cys"
  VARIANT (18)..(18): / replace = "Thr"
  VARIANT (20)..(20): / replace = "Arg"
  VARIANT (21)..(21): / replace = "Lys"
  VARIANT (27)..(27): / replace = "Val" / replace = "Ile"
  VARIANT (33)..(33): / replace = "Tyr"
  VARIANT (36)..(36): / replace = "Val"
  VARIANT (38)..(38): / replace = "Arg"
  VARIANT (44)..(44): / replace = "Val"
  VARIANT (45)..(45): / replace = "His"
ETLSRLAQWRIDNFTASSYKRSDPFKLGIWNWHLSIEKNRYLYIRLFPEP

SEQ ID NO: 550 - protein, 50 aa, Artificial sequence
  motif 14
  VARIANT (2)..(2): / replace = "Asp"
  VARIANT (3)..(3): / replace = "Leu"
  VARIANT (22)..(22): / replace = "Asn"
  UNSURE (30)..(30): Xaa can be any naturally occurring amino acid
  VARIANT (31)..(31): / replace = "Arg"
  VARIANT (38)..(38): / replace = "Thr"
KNACEESLLEDINSGNVLERLQEAWLYQLXKLKKGCLMYLFDFGKIYDVR

SEQ ID NO: 551 - protein, 50 aa, Artificial sequence
  motif 15
  VARIANT (5)..(5): / replace = "Glu"
  VARIANT (11)..(11): / replace = "Asn"
  VARIANT (13)..(13): / replace = "Lys"
  VARIANT (19)..(19): / replace = "Ile"
  VARIANT (21)..(21): / replace = "Asp"
  VARIANT (27)..(27): / replace = "Thr" / replace = "Val"
  VARIANT (31)..(31): / replace = "Met"
  VARIANT (37)..(37): / replace = "Ile"
  VARIANT (46)..(46): / replace = "Phe"
SPVFHSMFLHDLREKESSTINIEDMSLESCTALLSYLYGTIKQEDLWKHR

SEQ ID NO: 552 - DNA, 2194 bp, Oryza sativa; identical to SEQ ID NO: 321

SEQ ID NO: 553 - DNA, 3801 bp, Artificial sequence
  expression cassette
aatccgaaaagtttctgcaccgttttcaccccctaactaacaatatagggaacgtgtgctaaatataaaatgagaccttatatatgtagcgctgataactagaactatgcaagaaaaactcatccacctactttagtggcaatcgggctaaataaaaaagagtcgctacactagtttcgttttccttagtaattaagtgggaaaatgaaatcattattgcttagaatatacgttcacatctctgtcatgaagttaaattattcgaggtagccataattgtcatcaaactcttcttgaataaaaaaatctttctagctgaactcaatgggtaaagagagagattttttttaaaaaaatagaatgaagatattctgaacgtattggcaaagatttaaacatataattatataattttatagtttgtgcattcgtcatatcgcacatcattaaggacatgtcttactccatcccaatttttatttagtaattaaagacaattgacttatttttattatttatcttttttcgattagatgcaaggtacttacgcacacactttgtgctcatgtgcatgtgtgagtgcacctcctcaatacacgttcaactagcaacacatctctaatatcactcgcctatttaatacatttaggtagcaatatctgaattcaagcactccaccatcaccagaccacttttaataatatctaaaatacaaaaaataattttacagaatagcatgaaaagtatgaaacgaactatttaggtttttcacatacaaaaaaaaaaagaattttgctcgtgcgcgagcgccaatctcccatattgggcacacaggcaacaacagagtggctgcccacagaacaacccacaaaaaacgatgatctaacggaggacagcaagtccgcaacaaccttttaacagcaggctttgcggccaggagagaggaggagaggcaaagaaaaccaagcatcctcctcctcccatctataaattcctccccccttttcccctctctatataggaggcatccaagccaagaagagggagagcaccaaggacacgcgactagcagaagccgagcgaccgccttcttcgatccatatcttccggtcgagttcttggtcgatctcttccctcctccacctcctcctcacagggtatgtgcccttcggttgttcttggatttattgttctaggttgtgtagtacgggcgttgatgttaggaaaggggatctgtatctgtgatgattcctgttcttggatttgggatagaggggttcttgatgttgcatgttatcggttcggtttgattagtagtatggttttcaatcgtctggagagctctatggaaatgaaatggtttagggtacggaatcttgcgattttgtgagtaccttttgtttgaggtaaaatcagagcaccggtgattttgcttggtgtaataaaagtacggttgtttggtcctcgattctggtagtgatgcttctcgatttgacgaagctatcctttgtttattccctattgaacaaaaataatccaactttgaagacggtcccgttgatgagattgaatgattgattcttaagcctgtccaaaatttcgcagctggcttgtttagatacagtagtccccatcacgaaattcatggaaacagttataatcctcaggaacaggggattccctgttcttccgatttgctttagtcccagaattttttttcccaaatatcttaaaaagtcactttctggttcagttcaatgaattgattgctacaaataatgcttttatagcgttatcctagctgtagttcagttaataggtaatacccctatagtttagtcaggagaagaacttatccgatttctgatctccatttttaattatatgaaatgaactgtagcataagcagtattcatttggattattttttttattagctctcaccccttcattattctgagctgaaagtctggcatgaactgtcctcaattttgttttcaaattcacatcgattatctatgcattatcctcttgtatctacctgtagaagtttctttttggttattccttgactgcttgattacagaaagaaatttatgaagctgtaatcgggatagttatactgcttgttcttatgattcatttcctttgtgcagttcttggtgtagcttgccactttcaccagcaaagttcatttaaatcaactagggatatcacaagtttgtacaaaaaagcaggcttaaacaatgacagacagcaaggtagagactctatcaaggttagctcaatggaggatcgacaatttcacagcatctacttacaaaagatctgacccttttaaaattggtatatggaactggcatctgtcaattgagaagaatcggtatttgtatattcgattgtttcctgaaccttctcggctttcgaaagagcagcttcctcctccttttgctcgctttatgcttcgtgttactacaactggaaccaatcggagacctcatatatctcctgtatatgagaggctgcttcgaacaagtgatgactttgtgtggcctattgattcttgtttacaaggtcgatttgtcattgatgttgagttccttgacctgaagatctacaccccaaatggtggagaaggaaaatctatatggcccaatgacatgattttgcaatctttagctacccaaagtactctccgatgcctctctcgcatgcttgatgagtccatccatactgatgttaccattaatacggctgatggatcagtgcaagctcacagagcgatactgtctgctacttctcctgtattccacagcatgttccttcacgatctcagggagaaagagtcctctataatcgacatagaagacatgtcaacagaatcatgcacagcgcttcttagttacttgtatggaaccataaaacaagaggatctctggaagcaccgattggcattactgggtgcggcaaacaagtatgatattgtagatttgaagaatgcttgtgaggaaagtctcctagaagacatcaactcgggtaatgtcctcgaaagactgcaagaggcctggctttaccagctaaataaattgaaaaaaggttgcttgatgtatttgttcgattttggcaagatttatgatgttagggaggaaattaacaacttcttcagacaggcagatagagatctgatgctagagatgtttcaagaagtgctcacagtttggaagcctgcctaacatgatgaggtttttgccatagttgtatacccagctttcttgtacaaagtggtgatatcacaagcccgggcggtcttctagggataacagggtaattatatccctctagatcacaagcccgggcggtcttctacgatgattgagtaataatgtgtcacgcatcaccatgggtggcagtgtcagtgtgagcaatgacctgaatgaacaattgaaatgaaaagaaaaaaagtactccatctgttccaaattaaaattcattttaaccttttaataggtttatacaataattgatatatgttttctgtatatgtctaatttgttatcatccgggcggtcttctagggataacagggtaattatatccctctagacaacacacaacaaataagagaaaaaacaaataatattaatttgagaatgaacaaaaggaccatatcattcattaactcttctccatccatttccatttcacagttcgatagcgaaaaccgaataaaaaacacagtaaattacaagcacaacaaatggtacaagaaaaacagttttcccaatgccataatactcgaac

SEQ ID NO: 554 - DNA, 56 bp, Artificial sequence
  primer: prm17159
ggggacaagtttgtacaaaaaagcaggcttaaacaatgacagacagcaaggtagag

SEQ ID NO: 555 - DNA, 50 bp, Artificial sequence
  primer: prm17160
ggggaccactttgtacaagaaagctgggtatacaactatggcaaaaacct
